(19) United States
(12) Patent Application Publication
(10) Pub. No.: US 2015/0005183 A1
(43) Pub. Date: Jan. 1, 2015

(54) PROTEIN BIOMARKERS OF LATE STAGE BREAST CANCER

(71) Applicants: David Krizman, Gaithersburg, MD (US); Marlene M. Darfler, Rockville, MD (US); Thomas P. Conrads, Rockville, MD (US); Brian L. Hood, Rockville, MD (US)

(72) Inventors: David Krizman, Gaithersburg, MD (US); Marlene M. Darfler, Rockville, MD (US); Thomas P. Conrads, Rockville, MD (US); Brian L. Hood, Rockville, MD (US)

(73) Assignee: EXPRESSION PATHOLOGY, INC., Rockville, MD (US)

(21) Appl. No.: 13/932,990

(22) Filed: Jul. 1, 2013

(51) Int. Cl. G01N 33/68

(52) U.S. Cl. CPC G01N 33/6893
USPC 506/9; 435/23; 436/501; 435/7.92; 530/350; 530/386; 435/6.12; 435/6.11; 435/190; 530/356; 435/219

(57) ABSTRACT

This patent application discloses and describes proteins found to be differentially expressed between primary tumor breast cancer cells histologicaly defined as early stage (stage 0) breast cancer and primary breast cancer cells histologicaly defined as late stage (stage 3) breast cancer. These proteins can be used either individually or in specific combinations in diagnostic and prognostic protein assays on various biological samples from breast cancer patients to indicate the that a breast cancer patient's cancer is in an early, non-aggressive stage or in a late, aggressive stage. Determination of differential expression of these proteins can also be useful for indicating additional therapies to combat the aggressiveness of late stage breast cancer. The full length intact proteins can be assayed or peptides derived from these proteins can be assayed as reporters for these proteins. These proteins can also be identified as “companion diagnostic” proteins, wherein the differentially expressed proteins that are used as diagnostic and prognostic indicators can also be used as targets for therapeutic intervention of breast cancer. Also disclosed and described herein are isotope labeled versions of peptides from the proteins.

[0001] This application claims the benefit of U.S. Provisional Application No. 61/428,160, filed Dec. 29, 2010, entitled “Protein Biomarkers of Late Stage Breast Cancer,” the contents of which are hereby incorporated by reference in their entirety.

### BACKGROUND

[0002] In the United States, an estimated 180,000 new cases of invasive breast cancer are diagnosed among women on an annual basis, and approximately 40,000 are expected to die from breast cancer yearly. Only lung cancer accounts for more cancer deaths in women. Based on the most recent data, relative survival rates for women diagnosed with breast cancer are 89% survival 5 years after diagnosis, 81% after 10 years, and 73% after 15 years. However five-year relative survival is lower among women with a more advanced stage (more aggressive) at diagnosis where the 5-year relative survival is 98% for localized disease (stage 0 and 1), 84% for regional disease (stage 2), and 27% for distant-stage disease (stage 3 and 4). Thus, providing the ability to identify those patients at greater risk of having later stage cancer (stage 3 and 4) that may at first appear to be early stage cancer (stage 0-2) is paramount to increasing survival rates. This is because enhanced, more informed treatment decisions can be made based on identifying, at an earlier point, those patients that harbor more aggressive disease, which will ultimately save lives.

[0003] Once breast cancer is diagnosed in a patient, a typical initial treatment is to remove the tumor by surgery followed secondarily by chemotherapy treatment designed to kill any residual cancer cells not removed by surgery. Knowledge of the stage of the breast cancer is critical to patient treatment because different stages/grades of breast cancer respond differently to different treatment strategies. Determining the stage, grade, and/or aggressiveness of breast cancer is best determined by analyzing the actual breast tumor tissue after removal from the patient. Tumor cells within the breast tumor tissue can be histologicaly and molecularly analyzed in order to determine grade, stage, and/or extent of breast cancer as well as identify which therapeutic agent is best to use against any tumor cells that remain in the patient. The most widely and advantageously available form of cancer patient tissue is formalin fixed, paraffin embedded tissue.

[0004] Formaldehyde/formalin fixation of surgically removed tissue is by far and away the most common method of preserving cancer tissue worldwide and is the accepted convention for standard pathology practice. Aqueous solutions of formaldehyde are referred to as formalin. Formaldehyde/formalin fixation typically employs aqueous solutions of formaldehyde referred to as formalin. “100%” formalin consists of a saturated solution of formaldehyde (about 40% formaldehyde by volume or 37% by mass) in water, with a small amount of stabilizer, usually methanol to limit oxidation and degree of polymerization. The most common way in which tissue is preserved is to soak whole tissue for extended periods of time (8 hours to 48 hours) in aqueous formaldehyde, commonly termed 10% neutral buffered formalin, followed by embedding the fixed whole tissue in paraffin wax for long term storage at room temperature. Thus molecular analytical methods to analyze formalin fixed cancer tissue will be the most accepted and heavily utilized methods for analysis of cancer patient tissue.

[0005] A critical issue for determining breast cancer treatment is to identify those patients who at first appear to harbor non-aggressive localized disease (stage 0-2) that may actually harbor more aggressive disease (stage 3-4) that will more than likely recur despite surgery and first-line chemotherapy treatment. If patients can be better identified whose disease will more than likely recur because it is actually a more aggressive form of breast cancer than my appear from histopathology or other measures, then more aggressive surgical (e.g., radical mastectomy as opposed to tylectomy aka “lumpectomy”), first line chemotherapy, or an additional second line of therapy can be performed on those patients.

[0006] There are existing molecular tests designed to identify patients whose breast cancers are more aggressive than others by analyzing patient-derived formalin fixed tissue, such as the OncotypeDx test from GenomicHealth and the Mammaprint test from Agendia. However, these tests result in large numbers of patients that fall into an intermediate category where the test cannot give an indication of the likelihood of disease recurrence or non-recurrence. In addition, existing tests analyze nucleic acids and not the actual functional entities, proteins, that are differentially present in the breast cancer tissue/cells. Tests that utilize proteins as indicators of aggressive forms of breast cancer are more advantageous because it is the proteins, not the nucleic acids, that principally do the work of the cell, and it is the aberrantly expressed proteins that cause a cell to become cancerous. In addition, aberrantly expressed proteins can be targeted by drugs to selectively or specifically attack the cancer cells. Thus, diagnostic tests that analyze proteins, and proteomic technologies to perform analysis, are advantageous.

[0007] The field of proteomics strives to establish the identities, quantities, structures, and biochemical and cellular functions of all proteins in an organism. Application of proteomics has historically proceeded mostly on a one-protein-at-a-time basis. The human proteome contains hundreds of thousands of proteins, and using recently developed proteomic techniques, changes in proteins that are over expressed in cells within solid tissue as well as proteins that are shed into body fluids throughout disease progression can now be examined. Specific proteins, and patterns of proteins, that are found to be differentially expressed in diseased cells vs. normal cells can be reflective and diagnostic of a given disease state.

[0008] In recent years, advanced technologies and methodologies have been developed that provide an interface between clinical medicine/pathology and proteomics. High throughput global proteomic analysis technologies such as liquid-chromatography-tandem mass spectroscopy (LC-MS/MS) can be used to generate proteomic profiles from biological samples which are specific for disease. Such global profiles can be performed on all types of biological samples including frozen tissue, formalin fixed tissue, and bodily fluids.

[0009] Without targeted, convenient, and reliable screening/diagnostic tests for cancer, the lack of molecular diagnostic assays will continue to plague the health care system and complicate efforts to detect and treat malignancies in their earliest stages. Breast cancer protein biomarkers that are differentially expressed in early stage vs. late stage aggressive breast cancer tissue would help in reducing the suffering of women from breast cancer by greatly improving diagnosis of breast cancer, provide for improved diagnostics and prognostic capabilities, and provide targets for development of drugs that can more effectively treat breast cancer. In addition, the presence of these biomarkers in bodily fluids that result from localized shedding into the breast tissue lumens, and ultimately into blood would present a readily accessible body fluid that can be sampled for proteomics-based screening and early detection. The development of a proteomics-based diagnostic/screening test and treatment strategies for early vs. late stage breast cancer would represent a significant medical advance for a “personalized medicine” approach to breast cancer diagnosis, prognosis, and therapy.

### SUMMARY

[0010] The present disclosure provides, among other things, a method of diagnosing the presence of late stage (stage 3) breast cancer disease that may be masked by its histological appearance as a less-aggressive stage (stage 0) form of the disease. A sample is obtained from a patient. The sample is breast cancer tissue, breast cancer cells, or a bodily fluid such as serum or fluid aspirate that may contain cells/proteins derived from a patient's cancerous tissue. The presence and level of expression of at least one, two, three, four, five, six, seven, eight or more of the proteins listed in Table 1 are determined in the sample. The level of expression of the detected proteins in late stage (stage 3) is compared to the level of expression of the same proteins in early stage (stage 0) breast cancer. The differential expression of at least one or more proteins, or combinations of multiple proteins indicates the presence of late stage (stage 3) breast cancer disease. In this way a prognosis can be made, which is to determine that a breast cancer is late stage (stage 3), which may indicate a different treatment strategy for late stage (stage 3) vs. early stage (stage 0). In one embodiment, proteins, or peptide fragments thereof, are detected by mass spectroscopy, and the level of expression of at least one or more than one of the proteins is determined by a spectral count quantization mass spectrometry or by Selected Reaction Monitoring (SRM) mass spectrometry; which can also be referred to as a Multiple Reaction Monitoring (MRM) mass spectrometry, collectively referred to hereinafter referred to as SRM/MRM assay(s). In another embodiment, the proteins are detected and their levels of expression are determined by a protein microarray or by an immunoassay.

[0011] This disclosure also provides a method of identifying protein targets for therapeutic intervention in breast cancer. The presence and level of expression of one, two, three, four, five, six, seven, eight or more of the proteins listed in Table 1 are detected in the sample. The level of expression of the detected proteins in early late stage (stage 3) breast tissue is compared to the level of expression of the same proteins in early stage (stage 0) breast cancer. The differential expression of one, two, three, four, five, six, seven, eight or more proteins may indicate choice of therapy and define specific targets for therapeutic intervention in breast cancer.

[0012] The choice of sample for assessing protein expression includes solid tissue (normal or diseased) and bodily fluids derived from the patient through surgical means including biopsy and aspiration. Protein expression is most advantageously detected and measured in cells or tissue samples from solid tumor tissue because these are the actual cells that are growing and causing the disease. However, it is sometimes less invasive and more comfortable for the patient to collect a bodily fluid such as blood and/or ascites fluid that surrounds the tumor itself. These fluid sources may contain a number of the proteins listed in Table 1 because they can be secreted by the tumor cells into the surrounding fluid or the tumor cells themselves become dislodged from the solid tumor and can now be found in the fluid, and which in many cases is an easier sample to collect from a breast cancer patient. The proteins listed in Table 1 can be detected and levels measured in either solid tissue or a bodily fluid from the breast cancer patient.

[0013] In one embodiment a collection of biomarkers is provided for diagnosing whether or not a breast cancer is early stage (stage 0) or late stage (stage 3) comprising the steps of:
[0014] (a) measuring the level of expression of one, two, three, four, five, six, seven, eight or more of the proteins listed in Table 1 in a sample from a human patient, in which said sample comprises breast cancer tissue, breast cancer cells, or a bodily fluid such as blood or ascites fluid containing proteins from said patient's breast cancer said sample; and
[0015] (b) determining increased expression and/or decreased expression of said one, two, three, four, five, six, seven, eight or more of the proteins listed in Table 1 in a late stage (stage 3) breast cancer as compared to expression levels of those proteins listed in Table 1 in an early stage (stage 0) breast cancer;
   wherein the identification of one, two, three, four, five, six, seven, eight or more of those proteins indicates the potential that a primary breast cancer is more likely a late stage (stage 3) vs. an early stage (stage 0) in said patient. In another embodiment of the diagnostic method, one, two, three, four, five, six, seven, eight or more of the proteins listed in Table 1 as undergoing an increase are examined. In yet another embodiment of the diagnostic method, one, two, three, four, five, six, seven, eight or more of the proteins listed in Table 1 as undergoing a decrease are examined. In still another embodiment of the diagnostic method, one, two, three, four, five, six, seven, eight or more of the proteins listed in Table 1 as undergoing an increase, in combination with one, two, three, four, five, six, seven, eight or more of the proteins listed in Table 1 as undergoing a decrease are examined. The greater the number of biomarker proteins found in Table 1 to be increased (over-expressed) and/or decreased (under-expressed) in a sample obtained from a patient, the higher the probability that a primary breast cancer is a late stage (stage 3) cancer in that patient.

[0016] Certain embodiments of the invention are described below.
[0017] 1. A method of diagnosing that a breast cancer as an early stage primary breast cancer (stage 0) or a late stage (stage 3) breast cancer comprising the steps of:
   [0018] a) measuring the level of expression of at least one or more, at least two or more, at least 3 or more, or multiples and combinations of the proteins listed in Table 1 in a sample from a human patient, in which said sample comprises breast cancer tissue, breast cancer cells, or a bodily fluid such as blood or ascites fluid containing proteins from said patient's breast cancer said sample; and
   [0019] b) determining increased expression and/or decreased expression of said at least one or more, at least two or more, at least 3 or more, or multiples and combinations of the proteins listed in Table 1 in a late stage (stage 3) breast cancer as compared to expression levels of said at least one or more, at least two or more, at least 3 or more, or multiples and combinations of the proteins listed in Table 1 in early stage (stage 0) breast cancer indicating the potential that a primary breast cancer is more or less aggressive in said patient.
[0020] 2. The method of embodiment 1, wherein said breast cancer sample consists essentially of breast epithelial cells.
[0021] 3. The method of embodiment 1, wherein said bodily fluids include but are not limited to fractionated or unfractionated blood, serum, plasma, lymphatic fluid, or fluid collected by pleural effusion.
[0022] 4. The method of embodiment 1, wherein the tissue is collected by biopsy or surgical procedure.
[0023] 5. The method of embodiment 4, wherein the tissue is chemically fixed and preserved.
[0024] 6. The method of embodiment 5, wherein said chemical fixation and preservation comprises formalin fixation and embedding in paraffin.
[0025] 7. The method of embodiments 4 or 5, wherein the tissue is frozen.
[0026] 8. The method of embodiment 1, wherein said proteins are measured as intact, full-length proteins or are measured by measuring multiple or individual peptides derived by fragmentation of the intact, full-length proteins.
[0027] 9. The method of any of embodiments 1-8, wherein said proteins are detected by mass spectroscopy and the level of measured expression of said proteins is determined by spectral count quantification after said mass spectroscopy
[0028] 10. The method of any of embodiments 1-8, wherein said proteins are detected by mass spectroscopy and the level of measured expression of said proteins is determined by a Selected Reaction Monitoring (SRM) assay.
[0029] 11. The method of any of embodiments 1-8, wherein said proteins are detected by mass spectroscopy and the level of measured expression of said proteins is determined by a multiplex SRM assay, termed a multiple reaction monitoring (MRM) assay where more than one protein is detected and quantitated in a single mass spectrometry analysis.
[0030] 12. The method of any of embodiments 8-11, wherein said mass spectroscopy is selected from the group consisting of LC-ESI-MS/MS, MALDI-MS, tandem MS, TOF/TOF, TOF-MS, TOF-MS/MS, triple quadrupole MS, and triple quadrupole MS/MS.
[0031] 13. The method of embodiment 12, wherein said mass spectroscopy comprises liquid chromatography-tandem mass spectroscopy.
[0032] 14. The method of any one of any of embodiments 1-88, wherein said proteins are detected and their levels of expression are determined by a protein microarray or by an immunoassay.
[0033] 15. The method of embodiment 14, wherein said immunoassay is selected from the group consisting of immunohistochemistry, Western blot, dot blot, and ELISA.
[0034] 16. A method of indicating choice of therapy of primary breast cancer, comprising the steps of:
   [0035] a) detecting the presence and measuring the level of expression of at least one or more, at least two or more, at least 3 or more, or multiples and combinations of the proteins listed in Table 1 in a sample from a human patient, in which said sample comprises breast cancer tissue, breast cancer cells, or a bodily fluid such as blood or ascites fluid containing proteins from said patient's breast cancer said sample; and
   [0036] b) determining increased expression and/or decreased expression of said at least one or more, at least two or more, at least 3 or more, or multiples and combinations of the proteins listed in Table 1 in a late stage (stage 3) breast cancer as compared to expression levels of said at least one or more, at least two or more, at least 3 or more, or multiples and combinations of the proteins listed in Table 1 in early stage (stage 0) breast cancer indicating the potential that a primary breast cancer is more or less aggressive in said patient.
[0037] 17. A method comprising quantifying the amount of one or more, two or more, three or more, four or more, five or more, six or more, seven or more, or eight or more of the proteins in Table 1 or peptide fragments thereof.
[0038] 18. A composition comprising one or more, two or more, three or more, four or more, five or more, six or more, seven or more, eight or more, or ten or more of the proteins in Table 1, peptides thereof, and/or antibodies thereto.
[0039] 19. The composition of embodiment 18, comprising one or more, two or more, three or more, four or more, five or more, six or more, seven or more, or eight or more peptides of proteins in Table 1, wherein each peptide is derived from a different protein.
[0040] 20. The composition of embodiment 19, wherein each of the peptides is labeled with one or more isotopes independently selected from the group consisting of: 18O, 17O, 34S, 15N, 13C, 2H or combinations thereof.
[0041] 21. The composition of any of embodiments 19-20, comprising one or more, two or more, three or more, four or more, five or more, six or more, seven or more, or eight or more peptides of proteins in Table 1 that are increased in tissues from primary tumors that are late stage (stage 3) breast cancers.
[0042] 22. The composition of any of embodiments 19-21, comprising one or more, two or more, three or more, four or more, five or more, six or more, seven or more, or eight or more peptides of proteins in Table 1 that are decreased in tissues from primary tumors that are late stage (stage 3) breast cancers.
[0043] 23. The composition of any of embodiments 18-22, wherein said composition is substantially pure or free of other cellular components selected from any combination of other proteins, membranes lipids and/or nucleic acids.
[0044] 24. The method of any of embodiments 1-17, further comprising assessing and/or determining the level (amount) or sequence of one, two, three, four, five, six, seven, eight nine, ten or more nucleic acids in said protein digest.
[0045] 25. The method of embodiment 24, wherein said nucleic acids have a length selected independently from greater than about 15, 20, 25, 30, 35, 40, 50, 60, 75, or 100 nucleotides in length.
[0046] 26. The method of embodiment 25, wherein said nucleic acids have a length selected independently from less than about 150, 200, 250, 300, 350, 400, 500, 600, 750, 1,000, 2,000, 4,000, 5,000, 7,500, 10,000, 15,000, or 20,000 nucleotides in length.
[0047] 27. The method of any of embodiments 24-26, wherein assessing and/or determining the level (amount) or sequence comprises, determining either the sequence of nucleotides in the nucleic acids and/or a characteristic of the nucleic acids by any one or more of: nucleic acid sequencing, conducting restriction fragment polymorphism analysis, conducting hybridization with another nucleic acid, identification of one or more deletions and/or insertions, and/or determining the presence of mutations, including but not limited to, single base pair polymorphisms, transitions and/or transversions.
[0048] 28. The method of any of any of embodiments 24-27, wherein one, two, three, four, five, six, seven, eight nine, ten or more nucleic acids encode for proteins in Table 1.
[0049] 29. The method of embodiments any of 24-28, wherein said nucleic acids encode for proteins of SEQ ID Nos: 1-50, 51-113, 1-25, 26-50, 51-75, 76-100, 1-10, 11-20, 21-30, 31-40, 41-50, 51-60, 61-70, 71-80, 81-90, 91-100, 101-113 or fragments thereofable 1.

### DETAILED DESCRIPTION

### Biomarkers

[0050] Methodologies at the interface between clinical medicine/pathology and proteomics were utilized to identify differentially expressed proteins between early stage (stage 0) breast cancer epithelial cells and late stage (stage 3) breast cancer epithelial cells. The list of proteins of proteins provided in Table 1 was determined by global LC-MS/MS proteomic profiling of cells obtained from early stage (stage 0) breast cancer tissue and late stage (stage 3) breast cancer tissue; and comparing those proteins that were consistently over-expressed or under-expressed in early stage (stage 0) breast cancer cells as compared to late stage (stage 3) breast cancer cells. Of note is that many or all of these proteins may be readily assayed in bodily fluids that derive from breast cancer cells, such as ascites fluid or fluids derived from blood such as plasma and serum. It is either breast-derived tissue, breast epithelial cells, or bodily fluids that would be assayed for diagnostic evaluation of breast cancer by assaying for specific protein expression from the list described herein. Also, one or more of the same proteins form the basis for a targeted therapeutic approach whereby a drug would be directed towards these proteins. Identification of these proteins provides for the ability to determine early stage (stage 0) breast cancer from late stage (stage 3) in a broad variety of biological samples collected from a subject, including fixed and frozen tissue, and bodily fluid samples derived from both blood and ascites fluids. The diagnostic and prognostic endpoint for disease analysis includes both single analytes and proteomic patterns. Proteomic patterns may be composed of many individual proteins, each of which may not individually identify early stage (stage 0) from late stage (stage 3) breast cancers, but collectively identify early stage (stage 0) from late stage (stage 3) breast cancers. Also provided are individual proteins, patterns of proteins, and/or collections of multiple proteins to be utilized for diagnosis, prognosis, and therapy of recurrent breast cancer.

[0051] The methods provided herein make possible the evaluation of a primary breast cancer's stage of progression (early vs. late) and treatment strategies for a subject (patient) with breast cancer. The methods are useful for determining if a breast cancer that appears to be early stage non-aggressive (stage 0) by visual histological methods is likely to be a more aggressive advanced stage (stage 3) of breast cancer. By measuring one, two, three, four, five, six, seven, eight or more of the proteins from the list of proteins in Table 1, breast cancer can be diagnosed in a subject, the prognosis of that subject can be determined, and the specific drug for that subject's disease can be chosen. A sample of tissue, such as that which is surgically procured or biopsied from a subject and frozen or chemically fixed, or a bodily fluid, such as blood, serum, plasma, and/or ascites fluid is examined to evaluate and measure protein expression.

[0052] Observed differences in proteins from the list of proteins in Table 1 found in a biological sample from a subject with breast cancer that is early stage (stage 0) vs. a biological sample from a subject where the breast cancer is late stage (stage 3) represents a disease protein profile and is indicative of the presence, absence, nature or extent of cancer pathology in the patient.

[0053] In one embodiment, the difference between the late stage (stage 3) breast cancer protein profile and the reference early stage (stage 0) breast cancer protein profile comprises a difference in the amount of one, two, three, four, five, six, seven, eight or more biomarker proteins from the list in Table 1. The method for evaluating breast cancer pathology in a subject includes discriminating between different disease states or between a disease state and normal state. Such a profile is also used to determine prognosis, which aims to monitor the extent and expectations of the progression or regression of breast cancer in a given subject. To this end, the late stage (stage 3) breast cancer protein profile can be derived from a biological sample previously obtained from the subject, for example a biological sample obtained prior to treatment or as part of a general health screening.

[0054] The method is also well-suited to evaluate the efficacy of treatment decisions, such as drugs or surgeries. In the case of choice of drug therapy, one or more of the proteins within the late stage (stage 3) breast cancer protein profile can serve as a target for drug treatment. In one embodiment, the drug specifically interacts with individual and specific proteins from the list of proteins in Table 1. In another embodiment, the drug interacts with a binding partner of a protein from the list in Table 1, thereby altering the ability of the protein in Table 1 to interact with its binding partner or to carry out its biological function. In still another embodiment, the expression profile of one, two, three, four, five, six, seven, eight or more of the proteins may be used to select the drug therapy, and/or the duration/regimen.

[0055] The method further comprises a classification model or algorithm, based on one or more protein differences from the protein list of Table 1 between the test protein profile of a biological sample from a subject suspected of late stage (stage 3) breast cancer and the reference protein profile from a biological sample from a subject having early stage (stage 0) breast cancer.

[0056] In some embodiments early stage (stage 0) or late stage (stage 3) breast cancer protein profiles or both are generated using mass spectrometry. In such embodiments the methods of mass spectrometry employed may advantageously use ion trap instruments or triple quadrupole instruments. Generally for analysis by mass spectrometry, full length intact proteins are reduced to individual peptides by treatment of protein samples with a proteolytic enzyme, e.g. trypsin, papain, chymotrypsin, and others, thus rendering a complex protein sample preparation to a complex lysate consisting of peptides. Such peptide lysates are the preferred form of sample for analysis of proteins from a biological sample by mass spectrometry, where the quantitative presence of specific and individual peptides is indicative of the quantitative presence of the full length intact proteins from which the peptides derive. In one embodiment, analysis of all peptides simultaneously in a global fashion may advantageously be performed on an ion trap mass spectrometry instrument. In one embodiment, analysis of targeted peptides that specifically focus assays on individual and specific peptides, and thus the proteins from which they derive, is conducted on a triple quadrapole mass spectrometry instrument. Performing targeted quantitative protein analysis by triple quadrupole mass spectrometry may be accomplished using SRM/MRM methodology. That methodology can be used to generate a protein profile to investigate the likelihood of late stage (stage 3) breast cancer in a subject from which a biological sample was obtained.

[0057] Prior to analysis by mass spectrometry, peptides in the lysates may be subject to a variety of techniques that facilitate their analysis and measurement by mass spectrometry. In one embodiment, the peptides may be separated by an affinity technique, such as immunologically-based purification (e.g., immunoaffinity chromatography), chromatography on ion selective media, or if the peptides are modified, by separation using appropriate media, such as lectins for separation of carbohydrate modified peptides. In one embodiment, the SISCAPA method, which employs immunological separation of peptides prior to mass spectrometric analysis is employed. The SISCAPA technique is described, for example, in U.S. Pat. No. 7,632,686. In other embodiments, lectin affinity methods (e.g., affinity purification and/or chromatography may be used to separate peptides from a lysate prior to analysis by mass spectrometry. Methods for separation of groups of peptides, including lectin-based methods, are described, for example, in Geng et al., J. Chromatography B, 752:293-306 (2001). Immunoaffinity chromatography techniques, lectin affinity techniques and other forms of affinity separation and/or chromatography (e.g., reverse phase, size based separation, ion exchange) may be used in any suitable combination to facilitate the analysis of peptides by mass spectrometry.

[0058] Another assay method includes immobilizing the proteins and/or peptides from the proteins, on a microarray (e.g., using immobilized antibodies) prior to detecting the proteins using antibody-based methods including sandwich-type assays. Other assay methods include immunohistochemical analysis utilizing antibody-based protein detection methods on thin tissue sections, where the proteins are maintained in full length (not subject to proteolysis) within the tissue section. Still other assay methods include antibody-based Western blot and ELISA protein detection methods, where the protein preparations interrogated are full length intact proteins and/or derivative peptides. All of these described protein detection methods may be used to detect individual polypeptides that derive from whole intact proteins, and thus these methods do not necessarily require the detection of whole intact proteins, but can involve the detection of peptides derived from the whole intact proteins. These methods may be used alone or in any combination, including in combination with mass spectroscopy based methods. Any suitable report/detection system known in the art may be employed with such assays including, but not limited to, fluorescence, UV/Vis chromatophore development, plasmon resonance, metal staining, and the like.

[0059] Accordingly, a useful method is provided for detecting proteins from the protein list in Table 1 and polypeptides derived from these proteins. The presence, absence, nature or extent of breast cancer pathology indicating late stage (stage 3) breast cancer disease in a patient can be evaluated in view of the expression of one or more expressed biomarker proteins from the list, and/or a derivative peptide or peptides from the same proteins.

[0060] In yet another aspect, a method is provided for screening a patient or population of patients for breast cancer by assaying for the presence of one or more proteins found in Table 1, or their derivative peptides. The assay(s) employed may include mass spectrometric assays, immunologic assays, such as a Western blot, enzyme linked immunosorbent assay (ELISA), or immunohistochemical methods on intact tissue sections, or any combination thereof. As noted above, plurality (e.g., one, two, three, four, five, six, seven, eight or more) of proteins or derivative peptides that increase or decrease with an increased likelihood of breast cancer recurrence can be analyzed, thereby increasing the predictive power of the screening assay. In one embodiment one, two, three, four, five, six, seven, eight or more of the proteins listed in Table 1 as undergoing an increase, in combination with one, two, three, four, five, six, seven, eight or more of the proteins listed in Table 1 as undergoing a decrease are examined.

### Identifying the Biomarkers

[0061] The protein biomarkers (e.g., the proteins in Table 1) were selected based on their differential patterns of expression observed in breast cancer epithelial cells obtained from histologicaly determined early stage (stage 0) primary tumors and breast cancer epithelial cells obtained from primary tumors that were histologicaly determined early stage (stage 0) breast cancer. Levels of some proteins were increased in cancerous cells obtained from early stage (stage 0) breast cancer tissue when compared to levels of the same proteins in late stage (stage 3) cancerous cells while levels of other proteins decreased in early stage (stage 0) cancer tissue cells as compared to levels in late stage (stage 3) cancerous cells.

[0062] Data present in Table 1 were collected by the mass spectrometry analysis of protein lysates from tissues and cells of patients that suffered from late stage (stage 3) breast cancer and early stage (stage 0) breast cancer. Protein lysates obtained from the cells of the two patient populations contain all the necessary information about differential protein expression. Protein lysates from the cells of those patient populations were prepared using the Liquid Tissue™ protocol and reagents. The preparation method included collecting cells (tissue sample) into a tube via tissue microdissection followed by maintaining the cells (tissue sample) at an elevated temperature in a buffer for an extended period of time. (e.g., from about 80° C. to about 100° C. for a period of time from about 10 minutes to about 4 hours) to reverse or release protein cross-linking. The buffer employed is a neutral buffer, (e.g., a Tris-based buffer, or a buffer containing a detergent) and advantageously is a buffer that does not interfere with mass spectrometric analysis. Once the formalin induced cross linking has been negatively affected, the cells are then digested to completion in a predictable manner using a protease (e.g., trypsin). The result of the heating and proteolysis is a liquid, soluble, dilutable biomolecule lysate.

[0063] The prepared the lysates were then analyzed by global proteomic mass spectrometry and the data is initially presented as identification of the total number of peptides in each protein lysate. Once as many peptides as possible were identified in a single MS analysis of a single lysate, then that list of peptides was compared to the list of peptides identified across all lysates in a study set. Thus, the starting point for determining differential protein expression by mass spectrometry was a list of peptides found to be expressed in one sample and/or group of similar samples and compared to the list of peptides found expressed in a second sample and/or group of similar samples. The first group of seven (7) Liquid Tissue™ samples were derived from early stage (stage 0) primary breast cancer tissue from while the second group of nine (9) Liquid Tissue™ samples were derived from late stage (stage 3) primary breast cancer tissue. The comparison of those proteins that were differentially expressed between these two groups of patients, early stage (stage 0) breast cancer vs. late stage (stage 3) breast cancer, formed the initial study set of proteins set forth in Table 1.

[0064] The classification of differential protein expression from the lists of peptides found in patients that suffered recurrent and those that did not suffer from recurrent breast cancer was accomplished by first determining which proteins were represented by a given list of peptides, and then to count the total number of peptides identified for each protein. That method of data collating is known as the Spectral Count method (SC). The spectral count for a given protein is thus based on the total number of peptides identified for that protein in a single lysate, which is a relative indicator for the abundance of that protein in the lysate that was analyzed by MS. Spectral count is a mathematical method that provides the ability to compare relative protein abundances for a given protein from one sample and/or group of similar samples to the next sample and/or group of similar samples. This approach can also be uses to distinguish protein abundance between individual proteins within a given sample.

[0065] Spectral counts between thousands of individual proteins are compared for samples obtained from breast cancer epithelial cells obtained from multiple primary patient-derived tumors that gave rise to recurrent breast cancer and breast cancer epithelial cells obtained from multiple primary patient-derived tumors that did not give rise to recurrent breast cancer.

[0066] The protein abundance was thus derived by mass spectrometry analysis of protein lysates from multiple breast cancer tissues using spectral counting (SC) of peptides. In addition, peptides whose sequences mapped to multiple protein isoforms were grouped as per the principle of parsimony. To determine statistically significant changes in protein abundance across patient samples by disease stage sub-groups, a hierarchical supervised cluster analysis of peptides identified from early stage (stage 0) versus late stage (stage 3) patient samples was performed in which the variance in total spectral count peptides identified was determined utilizing the Mann-Whitney rank-sum test (significance level p≦0.05, Fisher's exact test) paired with the filter criteria requiring that 60% of the samples in a supervised group had a minimum peptide count of two (2) or greater for a given protein.

[0067] Selection of the proteins in Table 1 was limited to those proteins that showed significantly (significance level p≦0.05, Fisher's exact test) higher or lower spectral count abundance in early stage (stage 0) breast cancer tissues vs. late stage (stage 3) breast cancer tissues.

[0068] Table 1 shows the names of 113 proteins, 32 that were increased and 81 decreased in abundance, which significantly differentiate early stage (stage 0) versus late stage (stage 3) breast cancer patients. In one embodiment, the method of diagnosis will employ at least one or more proteins that have increased levels, another embodiment that employs decreased levels, and yet another embodiment that employs a combination of both increased and decreased levels. In addition, the method of diagnosis may involve specific combinations of decreased expression and/or increased expression across multiple proteins in a single assay to give a pattern of protein expression changes indicative of and diagnostic for late stage (stage 3) breast cancer. The information shown along the top of Table 1 from left to right are: 1) the Uniprot accession number, 2) the log₂ ratio spectral count change between early stage (stage 0) breast cancer and late stage (stage 3) breast cancer, 3) the direction of change in late stage (stage 3) breast cancer, 4) the protein abbreviation, and 5) the name of the protein. All proteins in this list meet the criteria of P values of less than 0.05 indicating their significance, and thus identifying each of these proteins as a candidate biomarker of late stage (stage 3) breast cancer that can be used for diagnosis, prognosis, or therapeutic targets of aggressive breast cancer.

TABLE 1

| SEQ | | Log₂ | | | |
|---|---|---|---|---|---|
| ID | Uniprot | Ratio | Change in Stage | | |
| NO: | Accession | Change | 3 Breast Cancer | Abbreviation | Protein Name |
| 1 | P59998 | −1.585 | Decrease | ARPC4 | actin related protein 2/3 complex, subunit 4, 20 kDa |
| 2 | P60709 | 0.6 | Increase | ACTB | actin, beta |
| 3 | P49748 | −1.701 | Decrease | ACADVL | acyl-CoA dehydrogenase, very long chain |
| 4 | P25054 | −1.1 | Decrease | APC | adenomatous polyposis coli |
| 5 | P23526 | −1.597 | Decrease | AHCY | adenosylhomocysteinase |
| 6 | Q09666 | −1.074 | Decrease | AHNAK | AHNAK nucleoprotein |
| 7 | O43488 | −2.427 | Decrease | AKR7A2 | aldo-keto reductase family 7, member A2 (aflatoxin aldehyde |
| | | | | | reductase) |
| 8 | P25311 | −2.083 | Decrease | AZGP1 | alpha-2-glycoprotein 1, zinc-binding |
| 9 | P20073 | −0.97 | Decrease | ANXA7 | annexin A7 |
| 10 | P25705 | −0.552 | Decrease | ATP5A1 | ATP synthase, H+ transporting, mitochondrial F1 complex |
| 11 | P21810 | 2.611 | Increase | BGN | biglycan |
| 12 | P12830 | −1.569 | Decrease | CDH1 | cadherin 1, type 1, E-cadherin (epithelial) |
| 13 | Q9H251 | −1.532 | Decrease | CDH23 | cadherin-related 23 |
| 14 | P27708 | 0.959 | Increase | CAD | carbamoyl-phosphate synthetase 2 |
| 15 | P16152 | −1.462 | Decrease | CBR1 | carbonyl reductase 1 |
| 16 | Q8N3K9 | 1.3 | Increase | CMYA5 | cardiomyopathy associated 5 |
| 17 | P35221 | −1.24 | Decrease | CTNNA1 | catenin (cadherin-associated protein), alpha 1, 102 kDa |
| 18 | P35222 | −2.564 | Decrease | CTNNB1 | catenin (cadherin-associated protein), beta 1, 88 kDa |
| 19 | Q02224 | −1.822 | Decrease | CENPE | centromere protein E, 312 kDa |
| 20 | Q5SY80 | −1.585 | Decrease | C1ORF101 | chromosome 1 open reading frame 101 |
| 21 | P53621 | −1.948 | Decrease | COPA | coatomer protein complex, subunit alpha |
| 22 | P02452 | 0.942 | Increase | COL1A1 | collagen, type I, alpha 1 |
| 23 | P08123 | 1.19 | Increase | COL1A2 | collagen, type I, alpha 2 |
| 24 | P12110 | 1.091 | Increase | COL6A2 | collagen, type VI, alpha 2 |
| 25 | A6NMZ7 | 1.03 | Increase | COL6A6 | collagen, type VI, alpha 6 |
| 26 | Q99715 | 2.666 | Increase | COL12A1 | collagen, type XII, alpha 1 |
| 27 | Q07092 | 1.415 | Increase | COL16A1 | collagen, type XVI, alpha 1 |
| 28 | Q86Y22 | 1.392 | Increase | COL23A1 | collagen, type XXIII, alpha 1 |
| 29 | O00571 | −1.363 | Decrease | DDX3X | DEAD (Asp-Glu-Ala-Asp) box polypeptide 3, X-linked |
| 30 | Q96HY7 | 2.445 | Increase | DHTKD1 | dehydrogenase E1 and transketolase domain containing 1 |
| 31 | P15924 | −1.054 | Decrease | DSP | desmoplakin |
| 32 | P60981 | −1.17 | Decrease | DSTN | destrin (actin depolymerizing factor) |
| 33 | Q9UJU6 | −3.301 | Decrease | DBNL | drebrin-like |
| 34 | P24534 | −2.079 | Decrease | EEF1B2 | eukaryotic translation elongation factor 1 beta 2 |
| 35 | B3KSH1 | −1.306 | Decrease | EIF3F | eukaryotic translation initiation factor 3, subunit F |
| 36 | Q9NUQ9 | 2.713 | Increase | FAM49B | family with sequence similarity 49, member B |
| 37 | P07954 | 0.811 | Increase | FH | fumarate hydratase |
| 38 | Q9P0M6 | −0.976 | Decrease | H2AFY2 | H2A histone family, member Y2 |
| 39 | P04792 | 1.222 | Increase | HSPB1 | heat shock 27 kDa protein 1 |
| 40 | P61978 | −0.604 | Decrease | HNRNPK | heterogeneous nuclear ribonucleoprotein K |
| 41 | Q6NTA2 | −0.903 | Decrease | HNRNPL | heterogeneous nuclear ribonucleoprotein L |
| 42 | P52272 | −0.872 | Decrease | HNRNPM | heterogeneous nuclear ribonucleoprotein M |
| 43 | O43390 | −0.915 | Decrease | HNRNPR | heterogeneous nuclear ribonucleoprotein R |
| 44 | Q9BUJ2 | −1.462 | Decrease | HNRNPUL1 | heterogeneous nuclear ribonucleoprotein U-like 1 |
| 45 | P51659 | −1.948 | Decrease | HSD17B4 | hydroxysteroid (17-beta) dehydrogenase 4 |
| 46 | Q96FF7 | −2.822 | Decrease | LOC113230 | hypothetical protein LOC113230 |
| 47 | Q96HQ3 | 1.078 | Increase | MGC20647 | hypothetical protein MGC20647 |
| 48 | Q9Y4L1 | −1.429 | Decrease | HYOU1 | hypoxia up-regulated 1 |
| 49 | Q8TDY8 | −0.903 | Decrease | IGDCC4 | immunoglobulin superfamily, DCC subclass, member 4 |
| 50 | Q12905 | −1.225 | Decrease | ILF2 | interleukin enhancer binding factor 2, 45 kDa |
| 51 | Q6DN90 | 1.775 | Increase | IQSEC1 | IQ motif and Sec7 domain 1 |
| 52 | P46940 | −1.24 | Decrease | IQGAP1 | IQ motif containing GTPase activating protein 1 |
| 53 | P14923 | −1.156 | Decrease | JUP | junction plakoglobin |
| 54 | B3KY79 | 1.281 | Increase | KRT7 | keratin 7 |
| 55 | Q9Y2L5 | 1.36 | Increase | KIAA1012 | KIAA1012 |
| 56 | Q9NS87 | 1.775 | Increase | KIF15 | kinesin family member 15 |
| 57 | Q03252 | −1.552 | Decrease | LMNB2 | lamin B2 |
| 58 | A4D0S4 | 2.544 | Increase | LAMB4 | laminin, beta 4 |
| 59 | P28838 | −1.301 | Decrease | LAP3 | leucine aminopeptidase 3 |
| 60 | Q32MZ4 | −1.848 | Decrease | LRRFIP1 | leucine rich repeat (in FLII) interacting protein 1 |
| 61 | Q8N1G4 | −1.441 | Decrease | LRRC47 | leucine rich repeat containing 47 |
| 62 | P09960 | −2.128 | Decrease | LTA4H | leukotriene A4 hydrolase |
| 63 | Q14847 | −1.555 | Decrease | LASP1 | LIM and SH3 protein 1 |
| 64 | P51884 | 2.292 | Increase | LUM | lumican |
| 65 | P14174 | −2.015 | Decrease | MIF | macrophage migration inhibitory factor (glycosylation-inhibiting |
| | | | | | factor) |
| 66 | P40925 | −1.237 | Decrease | MDH1 | malate dehydrogenase 1, NAD (soluble) |
| 67 | Q9UPN3 | −1.5 | Decrease | MACF1 | microtubule-actin crosslinking factor 1 |
| 68 | P98088 | 1.316 | Increase | MUC5AC | mucin 5AC, oligomeric mucus/gel-forming |
| 69 | P55198 | 1.29 | Increase | MLLT6 | myeloid/lymphoid or mixed-lineage leukemia (homolog, |
| | | | | | Drosophila) |
| 70 | O00567 | −1.684 | Decrease | NOP56 | NOP56 ribonucleoprotein homolog (yeast) |
| 71 | Q14980 | −0.899 | Decrease | NUMA1 | nuclear mitotic apparatus protein 1 |
| 72 | Q96L73 | −1.063 | Decrease | NSD1 | nuclear receptor binding SET domain protein 1 |
| 73 | P19338 | −0.311 | Decrease | NCL | nucleolin |
| 74 | Q99497 | −1.435 | Decrease | PARK7 | Parkinson disease (autosomal recessive, early onset) 7 |
| 75 | P23284 | −1.252 | Decrease | PPIB | peptidylprolyl isomerase B (cyclophilin B) |
| 76 | Q15063 | 1.745 | Increase | POSTN | periostin, osteoblast specific factor |
| 77 | Q5VU43 | −1.948 | Decrease | PDE4DIP | phosphodiesterase 4D interacting protein |
| 78 | Q99623 | −0.934 | Decrease | PHB2 | prohibitin 2 |
| 79 | Q9UQ80 | −2.865 | Decrease | PA2G4 | proliferation-associated 2G4, 38 kDa |
| 80 | Q14914 | −1.585 | Decrease | PTGR1 | prostaglandin reductase 1 |
| 81 | Q16401 | −1.5 | Decrease | PSMD5 | proteasome (prosome, macropain) 26S subunit, non-ATPase, 5 |
| 82 | P49720 | −1.289 | Decrease | PSMB3 | proteasome (prosome, macropain) subunit, beta type, 3 |
| 83 | P30101 | −0.745 | Decrease | PDIA3 | protein disulfide isomerase family A, member 3 |
| 84 | P14618 | −0.577 | Decrease | PKM2 | pyruvate kinase, muscle |
| 85 | P52566 | −1.1 | Decrease | ARHGDIB | Rho GDP dissociation inhibitor (GDI) beta |
| 86 | P49247 | 2.576 | Increase | RPIA | ribose 5-phosphate isomerase A |
| 87 | P36578 | −1.822 | Decrease | RPL4 | ribosomal protein L4 |
| 88 | P62249 | −2.948 | Decrease | RPS16 | ribosomal protein S16 |
| 89 | P39019 | −2.211 | Decrease | RPS19 | ribosomal protein S19 |
| 90 | P15880 | −1.314 | Decrease | RPS2 | ribosomal protein S2 |
| 91 | Q9NQ03 | −1.128 | Decrease | SCRT2 | scratch homolog 2, zinc finger protein (Drosophila) |
| 92 | O75396 | −0.933 | Decrease | SEC22B | SEC22 vesicle trafficking protein homolog B (S. cerevisiae) |
| 93 | A6PVW9 | −1.421 | Decrease | SELENBP1 | selenium binding protein 1 |
| 94 | Q15019 | −2.363 | Decrease | SEPT2 | septin 2 |
| 95 | O75368 | −2.363 | Decrease | SH3BGRL | SH3 domain binding glutamic acid-rich protein like |
| 96 | Q8WXH0 | −0.893 | Decrease | SYNE2 | spectrin repeat containing, nuclear envelope 2 |
| 97 | Q01082 | −1.069 | Decrease | SPTBN1 | spectrin, beta, non-erythrocytic 1 |
| 98 | Q15393 | −1.244 | Decrease | SF3B3 | splicing factor 3b, subunit 3, 130 kDa |
| 99 | Q9UMS6 | −2.948 | Decrease | SYNPO2 | synaptopodin 2 |
| 100 | P10599 | 0.891 | Increase | TXN | thioredoxin |
| 101 | P07996 | 1.985 | Increase | THBS1 | thrombospondin 1 |
| 102 | P19971 | −1.421 | Decrease | TYMP | thymidine phosphorylase |
| 103 | Q8WZ42 | −0.372 | Decrease | TTN | titin |
| 104 | B3KPZ8 | −0.82 | Decrease | TKT | transketolase |
| 105 | Q9UHN6 | 1 | Increase | TMEM2 | transmembrane protein 2 |
| 106 | A6NKL6 | 0.637 | Increase | TMEM200C | transmembrane protein 200C |
| 107 | P31946 | −0.773 | Decrease | YWHAB | tyrosine 3-monooxygenase/tryptophan 5-monooxygenase |
| | | | | | activation protein |
| 108 | Q70EL4 | 1.173 | Increase | USP43 | ubiquitin specific peptidase 43 |
| 109 | P22314 | −0.744 | Decrease | UBA1 | ubiquitin-like modifier activating enzyme 1 |
| 110 | P56704 | 0.814 | Increase | WNT3A | wingless-type MMTV integration site family, member 3A |
| 111 | P13010 | −1.158 | Decrease | XRCC5 | X-ray repair complementing defective repair in Chinese hamster |
| | | | | | cells 5 |
| 112 | P12956 | −0.887 | Decrease | XRCC6 | X-ray repair complementing defective repair in Chinese hamster |
| | | | | | cells 6 |
| 113 | Q5TAX3 | −0.217 | Decrease | ZCCHC11 | zinc finger, CCHC domain containing 11 |

[0069] The present methods encompass not only methods of diagnosis, prognosis, therapeutic treatment, and compositions that employ the proteins recited in Table 1, but also those that employ related proteins. In one embodiment, the related proteins encompass proteins/polypeptides that share at least some amino acid sequence with the proteins in Table 1, and which are produced by translation of alternate transcripts (or alternately processed transcripts) from the genes encoding the proteins in Table 1. In another embodiment, related proteins encompasses proteins/polypeptides that share at least some amino acid sequence with the proteins in Table 1 produced by changes at the translational or post-translation level (e.g., post translational modifications). In either embodiment, related proteins may comprise a sequence of greater than five, six, seven, eight, ten, twelve, fifteen, eighteen, or twenty contiguous amino acids that is identical to a sequence found in a protein in Table 1.

[0070] Embodiments provided herein include compositions comprising one or more, two or more, three or more, four or more, five or more, six or more, eight or more, or ten or more of the proteins in Table 1, or polypeptide fragments thereof. In some embodiments, the compositions comprise two or more, three or more, four or more, five or more, six or more, or seven or more antibodies that bind specifically to proteins found in Table for peptide fragments of those proteins. Compositions comprising peptides may include one or more, two or more, three or more, four or more, five or more, six or more, eight or more, or ten or more peptides that are isotopically labeled. Each of the peptides may be labeled with one or more isotopes selected independently from the group consisting of: ¹⁸O, ¹⁷O, ³⁴S, ¹⁵N, ¹³C, ²H or combinations thereof. Compositions comprising peptides from the any of the proteins in Table 1, whether isotope labeled or not, do not need to contain all of the peptides from any given protein (e.g., a complete set of tryptic peptides). In some embodiments the compositions will comprise only one, two, three, four, five, six, or seven peptides for two, three, four, five, six, seven, eight, nine, ten, or more of the proteins appearing in Table 1 or Table 2. Compositions comprising peptides may be in the form of dried or lyophilized materials, liquid (e.g., aqueous) solutions or suspensions, arrays, or blots.

### Use of the Biomarkers

[0071] The protein biomarkers described herein can be advantageous employed to improve the treatment of patients with breast cancer. The over-expression and/or under-expression of one or more proteins in late stage (stage 3) breast cancer vs. early stage (stage 0) breast cancer and the ability to assay for this over-expression and/or under-expression in a biological sample can be used to determine whether or not a person with breast cancer has a type of cancer that is more aggressive than others and should be treated as such. Where a protein profile is prepared that suggests a patient has a form of breast cancer that is more aggressive, the results may also indicate choices for therapy and/or treatment regimens which are different from those that would be used for patients with less aggressive breast cancers. In addition, determinations based on the altered expression of multiple proteins are more likely to be effective as indicators of late stage (stage 3) breast cancer than assessment of one or two proteins individually. The present methods include and provide for assessment and correlation of multiple proteins simultaneously in a single biological sample from an individual suspected of being afflicted with an aggressive form of breast cancer.

[0072] Over-expression and/or under-expression of one or more proteins in late stage (stage 3) breast cancer vs. early stage (stage 0) breast cancer and the ability to assay for this over-expression and/or under-expression in a biological sample can be used to help determine which therapeutic agent is chosen to achieve the best course of disease treatment. One or more of the proteins indicated herein can be targeted directly with a drug so that breast cancer cells can be killed preferentially instead of the normal cells in the tissue that are not expressing one or more of these proteins.

[0073] The type of biological sample assayed using one or more of these proteins as biomarkers of recurrent breast cancer include biopsied tissue or tissue removed surgically. The tissue can be fresh, frozen, and/or chemically fixed such as that which is preserved in formalin and other chemical fixatives of the like. Another form the biological sample can take is fractionated or unfractionated biofluid samples such as serum, plasma, whole blood, lymph fluids, and ascites fluids. All of these forms of a patient-derived biological sample can be assayed for expression of one or more of the proteins in Table 1.

[0074] Because both nucleic acids and protein can be analyzed from the same biomolecular lysate preparations employed herein (e.g. as U.S. Pat. No. 7,473,532) it is possible to generate additional information about disease diagnosis and drug treatment decisions from the same sample. For example, additional information about the state of the cells and their potential for uncontrolled growth, potential drug resistance, and the development of cancers can be obtained by analyzing nucleic acids from those lysate preparations. By using the lysate preparations for both protein/peptide analysis and nucleic acid analysis it is possible to obtain information about the status of any one, two, three, four, five or more genes and/or the nucleic acids, and/or the proteins they encode (e.g., mRNA molecules and their expression levels or splice variations) from the same biomolecular lysate preparation. For example information about any one, two, three, four, five or more peptides in Table 1, and or the proteins from which they were derived or the nucleic acids encoding those proteins may be assessed. The nucleic acids can be examined, for example, by: one or more sequencing methods, conducting restriction fragment polymorphism analysis, conducting hybridization with another nucleic acid, identify deletion, insertions, and/or determining the presence of mutations, including but not limited to, single base pair polymorphisms, transitions and/or transversions. Such tests may be conducted in any suitable format including, but not limited to, arrays, microarrays, on blots, or in solution (e.g., by polymerase chain reaction “PCR” or ligase chain reaction “LCR”).

[0075] Where hybridization with another nucleic acid is employed, the assay or test may be conducted in any suitable format (e.g., arrays/microarrays, blots, and the like) by contacting nucleic acids under conditions of suitable stringency to obtain specific binding. The required “stringency” of hybridization reactions determinable by one of ordinary skill in the art, and generally involves an empirical calculation dependent upon probe length, washing temperature, and salt concentration. In general, longer probes require higher temperatures for proper annealing, while shorter probes need lower temperatures. Hybridization generally depends on the ability of denatured DNA to anneal when complementary strands are present in an environment below their melting temperature, with. The higher the degree of desired homology between the probe and hybridizable sequence, the higher the relative temperature which can be used, and higher relative temperatures tend to make hybridization reactions more stringent and vice versa. See e.g., Ausubel et al., Current Protocols in Molecular Biology, Wiley Interscience Publishers, (1995). Hybridization reactions will typically employ stringent conditions or moderately stringent conditions.

[0076] “Stringent conditions” typically employ low ionic strength with or without a denaturant (e.g., formamide) and high temperature for washing, for example, 0.015 M sodium chloride/0.0015 M sodium citrate/0.1% sodium dodecyl sulfate at 50° C.

[0077] “Moderately stringent conditions” may be identified as described by Sambrook et al., Molecular Cloning: A Laboratory Manual, New York: Cold Spring Harbor Press, 1989, and include the use of washing solution and hybridization conditions (e.g., temperature, ionic strength and % SDS) less stringent that those described above. An example of moderately stringent conditions is overnight incubation at 37° C. in a solution comprising: 20% formamide, 5×SSC (150 mM NaCl, 15 mM trisodium citrate), 50 mM sodium phosphate (pH 7.6), 5×Denhardt's solution, 10% dextran sulfate, and 20 mg/ml denatured sheared salmon sperm DNA, followed by washing in 1×SSC at about 37-50° C. The skilled artisan will recognize how to adjust the temperature, ionic strength, etc. as necessary to accommodate factors such as probe length and the like.

[0078] In one embodiment, samples are analyzed for one, two, three, four, five, six, seven, eight, nine or more peptides produced from the proteins in Table 1, and/or nucleic acids encoding one or more of those peptides or the proteins from which they were derived by proteolysis. In an embodiment, samples are analyzed for two, three, four, five, six, seven, eight, nine or more peptides produced from the proteins in Table 1, and/or two, three, four, five, six, seven, eight, nine or more nucleic acids encoding proteins from Table 1, where the proteins from Table 1 are selected from any range of proteins represented by SEQ ID Nos: 1-50, 51-113, 1-25, 26-50, 51-75, 76-100, 1-10, 11-20, 21-30, 31-40, 41-50, 51-60, 61-70, 71-80, 81-90, 91-100, or 101-113 of Table 1.

### Example

[0079] Seven (7) formalin fixed breast cancer tissue samples obtained from patients whose breast cancer was histologicaly categorized as early stage (stage 0) primary breast cancer and nine (9) breast cancer tissue samples from patients whose breast cancers were histologicaly categorized as late stage (stage 3) primary breast cancer were interrogated for differential protein expression that correlates to cancer, and where these proteins may be used to improve diagnosis, prognosis, and therapy of breast cancer.

[0080] Tissue sections were prepared from each tissue for histologic analysis and procurement of epithelial cancer cells was performed by tissue microdissection. Soluble protein lysates were prepared from microdissected breast cancer tissue samples using the Liquid Tissue™ MS Protein Prep Kit (Expression Pathology, Inc.). Each lysate consisted of the total protein content of the microdissected cells digested into predictable peptide fragments by the protease trypsin. In this form each and every protein lysate can be evaluated by the technology of mass spectrometry for identification and quantification of the proteins present in each lysate. In addition, the total mass spectrometry data across all samples is used to determine differential protein expression between individual samples and between primary tumors from early stage (stage 0) breast cancer patients and primary tumors from patients with late stage (stage 3) breast cancer.

[0081] Mass spectrometry analysis of each trypsin-digested protein lysate was performed according to the following. Liquid chromatography (LC) was performed using a Dionex Ultimate 3000 system coupled on-line to a ThermoFisher linear ion trap mass spectrometer (MS). Separation of the sample was performed using a 75 μm ID×360 μm OD×10-cm-long fused silica capillary column 5 μm, 300 Å pore size Jupiter C-18 stationary phase. After injecting 5 μl of re-suspended protein lysate, the column was washed with 98% mobile phase A (0.1% formic acid in water) for 30 min and peptides were eluted using a linear gradient of 2% mobile phase B (0.1% formic acid in acetonitrile) to 42% mobile phase B in 140 min, then to 98% B in an additional 20 min, all at a constant flow rate of 250 nL/min. The Linear Ion Trap Mass Spectrometer (LIT-MS) was operated in a data-dependent MS/MS mode in which each full MS scan (precursor ion selection scan range of m/z 350-1800) was followed by seven MS/MS scans where the seven most abundant peptide molecular ions were selected for tandem MS using a relative collision-induced dissociation (CID) energy of 35%. Dynamic exclusion was utilized to minimize redundant selection of peptides for CID.

[0082] Peptide identifications were obtained by searching the LC-MS/MS data utilizing SEQUEST (BioWorks, v3.2, ThermoScientific) on a 72-node Beowulf cluster against a UniProt-derived human proteome database (version 10/08, 56,301 protein entries) obtained from the European Bioinformatics Institute (EBI) using the following parameters: trypsin (KR); full enzymatic-cleavage; two missed cleavages sites; 1.5 Da peptide mass tolerance peptide tolerance, 0.5 Da fragment ion tolerance and variable modifications for methionine oxidation (m/z 15.99492). Resulting peptide identifications were filtered according to specific SEQUEST scoring criteria: delta correlation (ΔCₙ) ≧0.08 and charge state dependent cross correlation (Xcorr) ≧1.9 for [M+H]¹⁺, ≧2.2 for [M+2H]²⁺, and ≧3.5 for [M+3H]³⁺ (Supplemental Table 1). These criteria resulted in a false discovery rate (FDR) of 5.84% for all peptides identified as determined by searching the entire data set against a decoy human database where the protein sequences were reversed. Protein abundance was derived by spectral counting (SC) and peptides whose sequences mapped to multiple protein isoforms were grouped as per the principle of parsimony. To determine statistically significant changes in protein abundance across patient samples by disease stage sub-groups, a hierarchical supervised cluster analysis of peptides identified from early stage (stage 0) versus late stage (stage 3) cancer was performed in which the variance in total spectral count peptides identified was determined utilizing the Mann-Whitney rank-sum test (significance level p≦0.05, Fisher's exact test) paired with the filter criteria requiring that 60% of the samples in a supervised group had a minimum peptide count of 2 or greater for a given protein.

[0083] Using the high confidence peptide data, peptide lists for each sample were combined and redundant peptide identifications were eliminated to generate a list of unique peptides. Each peptide in the list was already associated with a protein, so that the list was easily converted to a list of proteins, specifically a list of unique proteins was created for each patient sample. Based on these data a quantitative analysis to determine differential protein expression between cancer and normal was performed using the Spectral Count Quantitation method. Spectral Count Quantitation is the process of counting the number of unique peptides associated with each protein. A value of 4 beside a protein name reflects that there were 4 unique peptides that were associated with that particular protein. There may have been numerous repeated identifications for any of the individual peptides but, the count was based on unique peptides and not total peptides. This count directly correlates to the relative abundance of each particular protein, thus the more unique peptides identified for a proteins the greater the relative expression of that protein in any particular sample.

[0084] It was the goal of this data analysis to identify those proteins whose derived quantitative expression levels showed significant differences in expression between early stage (stage 0) breast cancer and late stage (stage 3) breast cancer samples. These criteria were established because those proteins that are identified by greater numbers of unique peptides in early stage (stage 0) breast cancer cells over late stage (stage 3) breast cancer cells are the most likely candidates for new biomarkers of aggressive, dangerous breast cancer. Cluster analysis, which is a statistical method that determines which items are significantly different between 2 separate groups, identified 113 proteins differentially expressed between early stage (stage 0) breast cancer cells and late stage (stage 3) breast cancer, and which are listed in Table 1.

### Selected Reaction Monitoring Assay for Analysis of Patient Tissue

[0085] The SRM/MRM assays described herein can measure relative or absolute quantitative levels of one or more specific peptides derived from one or more of the proteins listed in Table 1. The method is utilized to provide a means of measuring the amount of a given peptide, peptides, protein, or proteins, by mass spectrometry in a given peptide/protein preparation obtained from a patient's biological sample such as bodily fluid or a Liquid Tissue™ lysate from formalin fixed paraffin embedded tissue. SRM/MRM assays can measure peptides directly in complex protein lysates prepared from cells procured from patient tissue samples, such as formalin fixed cancer patient tissue.

[0086] Methods of preparing protein samples from formalin-fixed tissue are described in U.S. Pat. No. 7,473,532, the contents of which are hereby incorporated by references in their entirety. The methods described in that patent may conveniently be carried out using Liquid Tissue™ reagents available from Expression Pathology, Inc. (Rockville, Md.).

[0087] Results from SRM/MRM assays can be used to correlate accurate and precise quantitative levels of a given peptide, peptides, protein, or proteins, with the specific cancer of the patient from whom the biological sample was collected. This not only provides diagnostic information about the cancer, but also permits a physician or other medical professional to determine appropriate therapy for the patient. Such an assay provides diagnostically and therapeutically important information about levels of protein expression in a diseased tissue or other patient sample such as bodily fluids is termed a companion diagnostic assay. For example, such an assay can be designed to diagnose the stage or degree of a cancer and determine which therapeutic agent, or course of therapy, to which a patient is most likely to respond with a positive outcome. An SRM/MRM assay measures relative or absolute levels of specific unmodified peptides from a given protein, or protein, and also can measure absolute or relative levels of specific modified peptides from proteins. Examples of modifications include phosphorylated amino acid residues and glycosylated amino acid residues that are present on the peptides.

[0088] Relative quantitative levels of a given peptide, peptides, protein, or proteins, are determined by the SRM/MRM methodology whereby the mass spectrometry-derived signature peak area (or the peak height if the peaks are sufficiently resolved) of an individual peptide, or multiple peptides, from a given protein, or proteins, in one biological sample is compared to the signature peak area determined for the same identical peptide, or peptides, from the same protein, or proteins, using the same methodology in one or more additional and different biological samples. In this way, the amount of a particular peptide, or peptides, from a given protein, or proteins, is determined relative to the same peptide, or peptides, from the same protein, or proteins, across 2 or more biological samples under the same experimental conditions. In addition, relative quantitation can be determined for a given peptide, or peptides, from a single protein within a single sample by comparing the signature peak area for that peptide for that given protein by SRM/MRM methodology to the signature peak area for another and different peptide, or peptides, from a different protein, or proteins, within the same protein preparation from the biological sample. In this way, the amount of a particular peptide from a given protein, and therefore the amount of the given protein, is determined relative one to another within the same sample. These approaches generate quantitation of an individual peptide, or peptides, from a given protein to the amount of another peptide, or peptides, between samples and within samples wherein the amounts as determined by signature peak area are relative one to another, regardless of the absolute weight to volume or weight to weight amounts of peptides in the protein preparation from the biological sample. Relative quantitative data about individual signature peak areas between different samples are normalized to the amount of protein analyzed per sample. Relative quantitation can be performed across many peptides simultaneously in a single sample and/or across many samples to gain insight into relative protein amounts, one peptide/protein with respect to other peptides/proteins.

[0089] Absolute quantitative levels of a given protein, or proteins, are determined by the SRM/MRM methodology whereby the SRM/MRM signature peak area of an individual peptide from a given protein in one biological sample is compared to the SRM/MRM signature peak area of a known amount of a “spiked” internal standard. In one embodiment, the internal standard is a synthetic version of the same exact peptide that contains one or more amino acid residues labeled with one or more heavy isotopes. Such isotope labeled internal standards are synthesized so that mass spectrometry analysis generates a predictable and consistent SRM/MRM signature peak that is different and distinct from the native peptide signature peak, and which can be used as a comparator peak. Thus when the internal standard is spiked in known amounts into a protein preparation from a biological sample and analyzed by mass spectrometry, the signature peak area of the native peptide is compared to the signature peak area of the internal standard peptide, and this numerical comparison indicates either the absolute molarity and/or absolute weight of the native peptide present in the original protein preparation from the biological sample. Absolute quantitative data for fragment peptides are displayed according to the amount of protein analyzed per sample. Absolute quantitation can be performed across many peptides, and thus proteins, simultaneously in a single sample and/or across many samples to gain insight into absolute protein amounts in individual biological samples and in entire cohorts of individual samples.

[0090] The SRM/MRM assay method can be used to aid diagnosis of the stage of cancer, for example, directly in patient-derived tissue, such as formalin fixed tissue, and to aid in determining which therapeutic agent, and/or treatment strategy, would be most advantageous for use in treating that patient. Cancer tissue that is removed from a patient either through surgery, such as for therapeutic removal of partial or entire tumors, or through biopsy procedures conducted to determine the presence or absence of suspected disease, is analyzed to determine whether or not a specific protein, or proteins, and which forms of proteins, are present in that patient tissue. Moreover, the expression level of the protein(s) can be determined and compared to a “normal” or reference level found in healthy tissue or tissue that shows a different stage/grade of cancer. This information can then be used to assign a stage or grade to a specific cancer and can be matched to a strategy for treating the patient based on the determined levels of specific proteins. Matching specific information about levels of a given protein, or proteins, as determined by an SRM assay, to a treatment strategy that is based on levels of these proteins in cancer cells derived from the patient defines what has been termed a personalized medicine approach to treating disease. The SRM/MRM assay method described herein form the foundation of a personalized medicine approach by using analysis of proteins from the patient's own tissue as a source for diagnostic and treatment decisions. The SRM/MRM method described herein can be used to specifically assay proteins in Table 1.

[0091] Although the invention has been described in relation to certain embodiments thereof, and many details have been set forth for purposes of illustration, it will be apparent to those skilled in the art that the inventions is susceptible to additional embodiments and that certain of the details described herein may be varied considerably without departing from the basic principles of the inventions described herein.

1. A method of diagnosing that a breast cancer as an early stage primary breast cancer (stage 0) or a late stage (stage 3) breast cancer comprising the steps of:
a) measuring the level of expression of at least one or more, at least two or more, at least 3 or more, or multiples and combinations of the proteins listed in Table 1 in a sample from a human patient, in which said sample comprises breast cancer tissue, breast cancer cells, or a bodily fluid such as blood or ascites fluid containing proteins from said patient's breast cancer said sample; and
b) determining increased expression and/or decreased expression of said at least one or more, at least two or more, at least 3 or more, or multiples and combinations of the proteins listed in Table 1 in a late stage (stage 3) breast cancer as compared to expression levels of said at least one or more, at least two or more, at least 3 or more, or multiples and combinations of the proteins listed in Table 1 in early stage (stage 0) breast cancer indicating the potential that a primary breast cancer is more or less aggressive in said patient.

2. The method of claim 1, wherein said breast cancer sample consists essentially of breast epithelial cells.

3. The method of claim 1, wherein said bodily fluids include but are not limited to fractionated or unfractionated blood, serum, plasma, lymphatic fluid, or fluid collected by pleural effusion.

4. The method of claim 1, wherein the tissue is collected by biopsy or surgical procedure.

5. The method of claim 4, wherein the tissue is chemically fixed and preserved.

6. The method of claim 5, wherein said chemical fixation and preservation comprises formalin fixation and embedding in paraffin.

7. The method of claim 4, wherein the tissue is frozen.

8. The method of claim 1, wherein said proteins are measured as intact, full-length proteins or are measured by measuring multiple or individual peptides derived by fragmentation of the intact, full-length proteins.

9. The method of claim 1, wherein said proteins are detected by mass spectroscopy and the level of measured expression of said proteins is determined by spectral count quantification after said mass spectroscopy

10. The method of claim 1, wherein said proteins are detected by mass spectroscopy and the level of measured expression of said proteins is determined by a Selected Reaction Monitoring (SRM) assay.

11. The method claim 1, wherein said proteins are detected by mass spectroscopy and the level of measured expression of said proteins is determined by a multiplex SRM assay, termed a multiple reaction monitoring (MRM) assay where more than one protein is detected and quantitated in a single mass spectrometry analysis.

12. The method of claim 8, wherein said mass spectroscopy is selected from the group consisting of LC-ESI-MS/MS, MALDI-MS, tandem MS, TOF/TOF, TOF-MS, TOF-MS/MS, triple quadrupole MS, and triple quadrupole MS/MS.

13. The method of claim 12, wherein said mass spectroscopy comprises liquid chromatography-tandem mass spectroscopy.

14. The method of claim 1, wherein said proteins are detected and their levels of expression are determined by a protein microarray or by an immunoassay.

15. The method of claim 14, wherein said immunoassay is selected from the group consisting of immunohistochemistry, Western blot, dot blot, and ELISA.

16. A method of indicating choice of therapy of primary breast cancer, comprising the steps of:
a) detecting the presence and measuring the level of expression of at least one or more, at least two or more, at least 3 or more, or multiples and combinations of the proteins listed in Table 1 in a sample from a human patient, in which said sample comprises breast cancer tissue, breast cancer cells, or a bodily fluid such as blood or ascites fluid containing proteins from said patient's breast cancer said sample; and
b) determining increased expression and/or decreased expression of said at least one or more, at least two or more, at least 3 or more, or multiples and combinations of the proteins listed in Table 1 in a late stage (stage 3) breast cancer as compared to expression levels of said at least one or more, at least two or more, at least 3 or more, or multiples and combinations of the proteins listed in Table 1 in early stage (stage 0) breast cancer indicating the potential that a primary breast cancer is more or less aggressive in said patient.

17. A method comprising quantifying the amount of one or more, two or more, three or more, four or more, five or more, six or more, seven or more, or eight or more of the proteins in Table 1 or peptide fragments thereof.

18. A composition comprising one or more, two or more, three or more, four or more, five or more, six or more, seven or more, eight or more, or ten or more of the proteins in Table 1, peptides thereof, or antibodies thereto.

19. The composition of claim 18, comprising one or more, two or more, three or more, four or more, five or more, six or more, seven or more, or eight or more peptides of proteins in Table 1, wherein each peptide is derived from a different protein.

20. The composition of claim 19, wherein each of the peptides is labeled with one or more isotopes independently selected from the group consisting of: 18O, 17O, 34S, 15N, 13C, 2H or combinations thereof.

21. The composition of claim 19, comprising one or more, two or more, three or more, four or more, five or more, six or more, seven or more, or eight or more peptides of proteins in Table 1 that are increased in tissues from primary tumors that are late stage (stage 3) breast cancers.

22. The composition of claim 19, comprising one or more, two or more, three or more, four or more, five or more, six or more, seven or more, or eight or more peptides of proteins in Table 1 that are decreased in tissues from primary tumors that are late stage (stage 3) breast cancers.

23. The composition of claim 21, comprising one or more, two or more, three or more, four or more, five or more, six or more, seven or more, or eight or more peptides of proteins in Table 1 that are decreased in tissues from primary tumors that recurred in two years

24. The method of claim 1, further comprising assessing and/or determining the level (amount) or sequence of one, two, three, four, five, six, seven, eight nine, ten or more nucleic acids in said protein digest.

25. The method of claim 24, wherein said nucleic acids have a length selected independently from greater than about: 15, 20, 25, 30, 35, 40, 50, 60, 75, or 100 nucleotides in length.

26. The method of claim 25, wherein said nucleic acids have a length selected independently from less than about: 150, 200, 250, 300, 350, 400, 500, 600, 750, 1,000, 2,000, 4,000, 5,000, 7,500, 10,000, 15,000, or 20,000 nucleotides in length.

27. The method of claim 24, wherein assessing and/or determining the level (amount) or sequence comprises, determining either the sequence of nucleotides in the nucleic acids and/or a characteristic of the nucleic acids by any one or more of: nucleic acid sequencing, conducting restriction fragment polymorphism analysis, conducting hybridization with another nucleic acid, identification of one or more deletions and/or insertions, and/or determining the presence of mutations, including but not limited to, single base pair polymorphisms, transitions and/or transversions.

28. The method of claim 24, wherein one, two, three, four, five, six, seven, eight nine, ten or more nucleic acids encode for proteins in Table 1.

29. The method of claim 26, wherein said nucleic acids encode for proteins of SEQ ID Nos: 1-50, 51-113, 1-25, 26-50, 51-75, 76-100, 1-10, 11-20, 21-30, 31-40, 41-50, 51-60, 61-70, 71-80, 81-90, 91-100, 101-113 or fragments thereof Table 1.

The application's sequence listing, which the Patent Office published only in electronic form, follows.

SEQUENCE LISTING (113 sequences)

SEQ ID NO: 1 - protein, 168 aa, Homo sapiens
MTATLRPYLSAVRATLQAALCLENFSSQVVERHNKPEVEVRSSKELLLQPVTISRNEKEKVLIEGSINSVRVSIAVKQADEIEKILCHKFMRFMMMRAENFFILRRKPVEGYDISFLITNFHTEQMYKHKLVDFVIHFMEEIDKEISEMKLSVNARARIVAEEFLKNF

SEQ ID NO: 2 - protein, 375 aa, Homo sapiens
MDDDIAALVVDNGSGMCKAGFAGDDAPRAVFPSIVGRPRHQGVMVGMGQKDSYVGDEAQSKRGILTLKYPIEHGIVTNWDDMEKIWHHTFYNELRVAPEEHPVLLTEAPLNPKANREKMTQIMFETFNTPAMYVAIQAVLSLYASGRTTGIVMDSGDGVTHTVPIYEGYALPHAILRLDLAGRDLTDYLMKILTERGYSFTTTAEREIVRDIKEKLCYVALDFEQEMATAASSSSLEKSYELPDGQVITIGNERFRCPEALFQPSFLGMESCGIHETTFNSIMKCDVDIRKDLYANTVLSGGTTMYPGIADRMQKEITALAPSTMKIKIIAPPERKYSVWIGGSILASLSTFQQMWISKQEYDESGPSIVHRKCF

SEQ ID NO: 3 - protein, 655 aa, Homo sapiens
MQAARMAASLGRQLLRLGGGSSRLTALLGQPRPGPARRPYAGGAAQLALDKSDSHPSDALTRKKPAKAESKSFAVGMFKGQLTTDQVFPYPSVLNEEQTQFLKELVEPVSRFFEEVNDPAKNDALEMVEETTWQGLKELGAFGLQVPSELGGVGLCNTQYARLVEIVGMHDLGVGITLGAHQSIGFKGILLFGTKAQKEKYLPKLASGETVAAFCLTEPSSGSDAASIRTSAVPSPCGKYYTLNGSKLWISNGGLADIFTVFAKTPVTDPATGAVKEKITAFVVERGFGGITHGPPEKKMGIKASNTAEVFFDGVRVPSENVLGEVGSGFKVAMHILNNGRFGMAAALAGTMRGIIAKAVDHATNRTQFGEKIHNFGLIQEKLARMVMLQYVTESMAYMVSANMDQGATDFQIEAAISKIFGSEAAWKVTDECIQIMGGMGFMKEPGVERVLRDLRIFRIFEGTNDILRLFVALQGCMDKGKELSGLGSALKNPFGNAGLLLGEAGKQLRRRAGLGSGLSLSGLVHPELSRSGELAVRALEQFATVVEAKLIKHKKGIVNEQFLLQRLADGAIDLYAMVVVLSRASRSLSEGHPTAQHEKMLCDTWCIEAAARIREGMAALQSDPWQQELYRNFKSISKALVERGGVVTSNPLGF

SEQ ID NO: 4 - protein, 2843 aa, Homo sapiens
MAAASYDQLLKQVEALKMENSNLRQELEDNSNHLTKLETEASNMKEVLKQLQGSIEDEAMASSGQIDLLERLKELNLDSSNFPGVKLRSKMSLRSYGSREGSVSSRSGECSPVPMGSFPRRGFVNGSRESTGYLEELEKERSLLLADLDKEEKEKDWYYAQLQNLTKRIDSLPLTENFSLQTDMTRRQLEYEARQIRVAMEEQLGTCQDMEKRAQRRIARIQQIEKDILRIRQLLQSQATEAERSSQNKHETGSHDAERQNEGQGVGEINMATSGNGQGSTTRMDHETASVLSSSSTHSAPRRLTSHLGTKVEMVYSLLSMLGTHDKDDMSRTLLAMSSSQDSCISMRQSGCLPLLIQLLHGNDKDSVLLGNSRGSKEARARASAALHNIIHSQPDDKRGRREIRVLHLLEQIRAYCETCWEWQEAHEPGMDQDKNPMPAPVEHQICPAVCVLMKLSFDEEHRHAMNELGGLQAIAELLQVDCEMYGLTNDHYSITLRRYAGMALTNLTFGDVANKATLCSMKGCMRALVAQLKSESEDLQQVIASVLRNLSWRADVNSKKTLREVGSVKALMECALEVKKESTLKSVLSALWNLSAHCTENKADICAVDGALAFLVGTLTYRSQTNTLAIIESGGGILRNVSSLIATNEDHRQILRENNCLQTLLQHLKSHSLTIVSNACGTLWNLSARNPKDQEALWDMGAVSMLKNLIHSKHKMIAMGSAAALRNLMANRPAKYKDANIMSPGSSLPSLHVRKQKALEAELDAQHLSETFDNIDNLSPKASHRSKQRHKQSLYGDYVFDTNRHDDNRSDNFNTGNMTVLSPYLNTTVLPSSSSSRGSLDSSRSEKDRSLERERGIGLGNYHPATENPGTSSKRGLQISTTAAQIAKVMEEVSAIHTSQEDRSSGSTTELHCVTDERNALRRSSAAHTHSNTYNFTKSENSNRTCSMPYAKLEYKRSSNDSLNSVSSSDGYGKRGQMKPSIESYSEDDESKFCSYGQYPADLAHKIHSANHMDDNDGELDTPINYSLKYSDEQLNSGRQSPSQNERWARPKHIIEDEIKQSEQRQSRNQSTTYPVYTESTDDKHLKFQPHFGQQECVSPYRSRGANGSETNRVGSNHGINQNVSQSLCQEDDYEDDKPTNYSERYSEEEQHEEEERPTNYSIKYNEEKRHVDQPIDYSLKYATDIPSSQKQSFSFSKSSSGQSSKTEHMSSSSENTSTPSSNAKRQNQLHPSSAQSRSGQPQKAATCKVSSINQETIQTYCVEDTPICFSRCSSLSSLSSAEDEIGCNQTTQEADSANTLQIAEIKEKIGTRSAEDPVSEVPAVSQHPRTKSSRLQGSSLSSESARHKAVEFSSGAKSPSKSGAQTPKSPPEHYVQETPLMFSRCTSVSSLDSFESRSIASSVQSEPCSGMVSGIISPSDLPDSPGQTMPPSRSKTPPPPPQTAQTKREVPKNKAPTAEKRESGPKQAAVNAAVQRVQVLPDADTLLHFATESTPDGFSCSSSLSALSLDEPFIQKDVELRIMPPVQENDNGNETESEQPKESNENQEKEAEKTIDSEKDLLDDSDDDDIEILEECIISAMPTKSSRKAKKPAQTASKLPPPVARKPSQLPVYKLLPSQNRLQPQKHVSFTPGDDMPRVYCVEGTPINFSTATSLSDLTIESPPNELAAGEGVRGGAQSGEFEKRDTIPTEGRSTDEAQGGKTSSVTIPELDDNKAEEGDILAECINSAMPKGKSHKPFRVKKIMDQVQQASASSSAPNKNQLDGKKKKPTSPVKPIPQNTEYRTRVRKNADSKNNLNAERVFSDNKDSKKQNLKNNSKVFNDKLPNNEDRVRGSFAFDSPHHYTPIEGTPYCFSRNDSLSSLDFDDDDVDLSREKAELRKAKENKESEAKVTSHTELTSNQQSANKTQAIAKQPINRGQPKPILQKQSTFPQSSKDIPDRGAATDEKLQNFAIENTPVCFSHNSSLSSLSDIDQENNNKENEPIKETEPPDSQGEPSKPQASGYAPKSFHVEDTPVCFSRNSSLSSLSIDSEDDLLQECISSAMPKKKKPSRLKGDNEKHSPRNMGGILGEDLTLDLKDIQRPDSEHGLSPDSENFDWKAIQEGANSIVSSLHQAAAAACLSRQASSDSDSILSLKSGISLGSPFHLTPDQEEKPFTSNKGPRILKPGEKSTLETKKIESESKGIKGGKKVYKSLITGKVRSNSEISGQMKQPLQANMPSISRGRTMIHIPGVRNSSSSTSPVSKKGPPLKTPASKSPSEGQTATTSPRGAKPSVKSELSPVARQTSQIGGSSKAPSRSGSRDSTPSRPAQQPLSRPIQSPGRNSISPGRNGISPPNKLSQLPRTSSPSTASTKSSGSGKMSYTSPGRQMSQQNLTKQTGLSKNASSIPRSESASKGLNQMNNGNGANKKVELSRMSSTKSSGSESDRSERPVLVRQSTFIKEAPSPTLRRKLEESASFESLSPSSRPASPTRSQAQTPVLSPSLPDMSLSTHSSVQAGGWRKLPPNLSPTIEYNDGRPAKRHDIARSHSESPSRLPINRSGTWKREHSKHSSSLPRVSTWRRTGSSSSILSASSESSEKAKSEDEKHVNSISGTKQSKENQVSAKGTWRKIKENEFSPTNSTSQTVSSGATNGAESKTLIYQMAPAVSKTEDVWVRIEDCPINNPRSGRSPTGNTPPVIDSVSEKANPNIKDSKDNQAKQNVGNGSVPMRTVGLENRLNSFIQVDAPDQKGTEIKPGQNNPVPVSETNESSIVERTPFSSSSSSKHSSPSGTVAARVTPFNYNPSPRKSSADSTSARPSQIPTPVNNNTKKRDSKTDSTESSGTQSPKRHSGSYLVTSV

SEQ ID NO: 5 - protein, 432 aa, Homo sapiens
MSDKLPYKVADIGLAAWGRKALDIAENEMPGLMRMRERYSASKPLKGARIAGCLHMTVETAVLIETLVTLGAEVQWSSCNIFSTQDHAAAAIAKAGIPVYAWKGETDEEYLWCIEQTLYFKDGPLNMILDDGGDLTNLIHTKYPQLLPGIRGISEETTTGVHNLYKMMANGILKVPAINVNDSVTKSKFDNLYGCRESLIDGIKRATDVMIAGKVAVVAGYGDVGKGCAQALRGFGARVIITEIDPINALQAAMEGYEVTTMDEACQEGNIFVTTTGCIDIILGRHFEQMKDDAIVCNIGHFDVEIDVKWLNENAVEKVNIKPQVDRYRLKNGRRIILLAEGRLVNLGCAMGHPSFVMSNSFTNQVMAQIELWTHPDKYPVGVHFLPKKLDEAVAEAHLGKLNVKLTKLTEKQAQYLGMSCDGPFKPDHYRY

SEQ ID NO: 6 - protein, 5890 aa, Homo sapiens
MEKEETTRELLLPNWQGSGSHGLTIAQRDDGVFVQEVTQNSPAARTGVVKEGDQIVGATIYFDNLQSGEVTQLLNTMGHHTVGLKLHRKGDRSPEPGQTWTREVFSSCSSEVVLSGDDEEYQRIYTTKIKPRLKSEDGVEGDLGETQSRTITVTRRVTAYTVDVTGREGAKDIDISSPEFKIKIPRHELTEISNVDVETQSGKTVIRLPSGSGAASPTGSAVDIRAGAISASGPELQGAGHSKLQVTMPGIKVGGSGVNVNAKGLDLGGRGGVQVPAVDISSSLGGRAVEVQGPSLESGDHGKIKFPTMKVPKFGVSTGREGQTPKAGLRVSAPEVSVGHKGGKPGLTIQAPQLEVSVPSANIEGLEGKLKGPQITGPSLEGDLGLKGAKPQGHIGVDASAPQIGGSITGPSVEVQAPDIDVQGPGSKLNVPKMKVPKFSVSGAKGEETGIDVTLPTGEVTVPGVSGDVSLPEIATGGLEGKMKGTKVKTPEMIIQKPKISMQDVDLSLGSPKLKGDIKVSAPGVQGDVKGPQVALKGSRVDIETPNLEGTLTGPRLGSPSGKTGTCRISMSEVDLNVAAPKVKGGVDVTLPRVEGKVKVPEVDVRGPKVDVSAPDVEAHGPEWNLKMPKMKMPTFSTPGAKGEGPDVHMTLPKGDISISGPKVNVEAPDVNLEGLGGKLKGPDVKLPDMSVKTPKISMPDVDLHVKGTKVKGEYDVTVPKLEGELKGPKVDIDAPDVDVHGPDWHLKMPKMKMPKFSVPGFKAEGPEVDVNLPKADVDISGPKIDVTAPDVSIEEPEGKLKGPKFKMPEMNIKVPKISMPDVDLHLKGPNVKGEYDVTMPKVESEIKVPDVELKSAKMDIDVPDVEVQGPDWHLKMPKMKMPKFSMPGFKAEGPEVDVNLPKADVDISGPKVGVEVPDVNIEGPEGKLKGPKFKMPEMNIKAPKISMPDVDLHMKGPKVKGEYDMTVPKLEGDLKGPKVDVSAPDVEMQGPDWNLKMPKIKMPKFSMPSLKGEGPEFDVNLSKANVDISAPKVDTNAPDLSLEGPEGKLKGPKFKMPEMHFRAPKMSLPDVDLDLKGPKMKGNVDISAPKIEGEMQVPDVDIRGPKVDIKAPDVEGQGLDWSLKIPKMKMPKFSMPSLKGEGPEVDVNLPKADVVVSGPKVDIEAPDVSLEGPEGKLKGPKFKMPEMHFKTPKISMPDVDLHLKGPKVKGDVDVSVPKVEGEMKVPDVEIKGPKMDIDAPDVEVQGPDWHLKMPKMKMPKFSMPGFKGEGREVDVNLPKADIDVSGPKVDVEVPDVSLEGPEGKLKGPKFKMPEMHFKAPKISMPDVDLNLKGPKLKGDVDVSLPEVEGEMKVPDVDIKGPKVDISAPDVDVHGPDWHLKMPKVKMPKFSMPGFKGEGPEVDVKLPKADVDVSGPKMDAEVPDVNIEGPDAKLKGPKFKMPEMSIKPQKISIPDVGLHLKGPKMKGDYDVTVPKVEGEIKAPDVDIKGPKVDINAPDVEVHGPDWHLKMPKVKMPKFSMPGFKGEGPEVDMNLPKADLGVSGPKVDIDVPDVNLEAPEGKLKGPKFKMPSMNIQTHKISMPDVGLNLKAPKLKTDVDVSLPKVEGDLKGPEIDVKAPKMDVNVGDIDIEGPEGKLKGPKFKMPEMHFKAPKISMPDVDLHLKGPKVKGDMDVSVPKVEGEMKVPDVDIKGPKVDIDAPDVEVHDPDWHLKMPKMKMPKFSMPGFKAEGPEVDVNLPKADIDVSGPSVDTDAPDLDIEGPEGKLKGSKFKMPKLNIKAPKVSMPDVDLNLKGPKLKGEIDASVPELEGDLRGPQVDVKGPFVEAEVPDVDLECPDAKLKGPKFKMPEMHFKAPKISMPDVDLHLKGPKVKGDADVSVPKLEGDLTGPSVGVEVPDVELECPDAKLKGPKFKMPDMHFKAPKISMPDVDLHLKGPKVKGDVDVSVPKLEGDLTGPSVGVEVPDVELECPDAKLKGPKFKMPEMHFKTPKISMPDVDLHLKGPKVKGDMDVSVPKVEGEMKVPDVDIKGPKMDIDAPDVDVHGPDWHLKMPKMKMPKFSMPGFKAEGPEVDVNLPKADVVVSGPKVDVEVPDVSLEGPEGKLKGPKLKMPEMHFKAPKISMPDVDLHLKGPKVKGDVDVSLPKLEGDLTGPSVDVEVPDVELECPDAKLKGPKFKMPEMHFKTPKISMPDVNLNLKGPKVKGDMDVSVPKVEGEMKVPDVDIRGPKVDIDAPDVDVHGPDWHLKMPKMKMPKFSMPGFKGEGPEVDVNLPKADVDVSGPKVDVEVPDVSLEGPEGKLKGPKFKMPEMHFKTPKISMPDVDFNLKGPKIKGDVDVSAPKLEGELKGPELDVKGPKLDADMPEVAVEGPNGKWKTPKFKMPDMHFKAPKISMPDLDLHLKSPKAKGEVDVDVPKLEGDLKGPHVDVSGPDIDIEGPEGKLKGPKFKMPDMHFKAPNISMPDVDLNLKGPKIKGDVDVSVPEVEGKLEVPDMNIRGPKVDVNAPDVQAPDWHLKMPKMKMPKFSMPGFKAEGPEVDVNLPKADVDISGPKVDIEGPDVNIEGPEGKLKGPKLKMPEMNIKAPKISMPDFDLHLKGPKVKGDVDVSLPKVEGDLKGPEVDIKGPKVDINAPDVGVQGPDWHLKMPKVKMPKFSMPGFKGEGPDGDVKLPKADIDVSGPKVDIEGPDVNIEGPEGKLKGPKFKMPEMNIKAPKISMPDIDLNLKGPKVKGDVDVSLPKVEGDLKGPEVDIKGPKVDIDAPDVDVHGPDWHLKMPKIKMPKISMPGFKGEGPDVDVNLPKADIDVSGPKVDVECPDVNIEGPEGKWKSPKFKMPEMHFKTPKISMPDIDLNLTGPKIKGDVDVTGPKVEGDLKGPEVDLKGPKVDIDVPDVNVQGPDWHLKMPKMKMPKFSMPGFKAEGPEVDVNLPKADVDVSGPKVDVEGPDVNIEGPEGKLKGPKFKMPEMNIKAPKIPMPDFDLHLKGPKVKGDVDISLPKVEGDLKGPEVDIRGPQVDIDVPDVGVQGPDWHLKMPKVKMPKFSMPGFKGEGPDVDVNLPKADLDVSGPKVDIDVPDVNIEGPEGKLKGPKFKMPEMNIKAPKISMPDIDLNLKGPKVKGDMDVSLPKVEGDMKVPDVDIKGPKVDINAPDVDVQGPDWHLKMPKIKMPKISMPGFKGEGPEVDVNLPKADLDVSGPKVDVDVPDVNIEGPDAKLKGPKFKMPEMNIKAPKISMPDLDLNLKGPKMKGEVDVSLANVEGDLKGPALDIKGPKIDVDAPDIDIHGPDAKLKGPKLKMPDMHVNMPKISMPEIDLNLKGSKLKGDVDVSGPKLEGDIKAPSLDIKGPEVDVSGPKLNIEGKSKKSRFKLPKFNFSGSKVQTPEVDVKGKKPDIDITGPKVDINAPDVEVQGKVKGSKFKMPFLSISSPKVSMPDVELNLKSPKVKGDLDIAGPNLEGDFKGPKVDIKAPEVNLNAPDVDVHGPDWNLKMPKMKMPKFSVSGLKAEGPDVAVDLPKGDINIEGPSMNIEGPDLNVEGPEGGLKGPKFKMPDMNIKAPKISMPDIDLNLKGPKVKGDVDISLPKLEGDLKGPEVDIKGPKVDINAPDVDVHGPDWHLKMPKVKMPKFSMPGFKGEGPEVDVTLPKADIDISGPNVDVDVPDVNIEGPDAKLKGPKFKMPEMNIKAPKISMPDFDLNLKGPKMKGDVVVSLPKVEGDLKGPEVDIKGPKVDIDTPDINIEGSEGKFKGPKFKIPEMHLKAPKISMPDIDLNLKGPKVKGDVDVSLPKMEGDLKGPEVDIKGPKVDINAPDVDVQGPDWHLKMPKVKMPKFSMPGFKGEGPDVDVNLPKADLDVSGPKVDIDVPDVNIEGPEGKLKGPKFKMPEMNIKAPKISMPDIDLNLKGPKVKGDMDVSLPKVEGDMQVPDLDIKGPKVDINAPDVDVRGPDWHLKMPKIKMPKISMPGFKGEGPEVDVNLPKADLDVSGPKVDVDVPDVNIEGPDAKLKGPKFKMPEMNIKAPKISMPDFDLHLKGPKVKGDVDVSLPKMEGDLKAPEVDIKGPKVDIDAPDVDVHGPDWHLKMPKVKMPKFSMPGFKGEGPEVDVNLPKADIDVSGPKVDIDTPDIDIHGPEGKLKGPKFKMPDLHLKAPKISMPEVDLNLKGPKMKGDVDVSLPKVEGDLKGPEVDIKGPKVDIDVPDVDVQGPDWHLKMPKVKMPKFSMPGFKGEGPDVDVNLPKADLDVSGPKVDIDVPDVNIEGPDAKLKGPKFKMPEMNIKAPKISMPDFDLHLKGPKVKGDVDVSLPKVEGDLKGPEVDIKGPKVDIDAPDVDVHGPDWHLKMPKVKMPKFSMPGFKGEGPDVDVTLPKADIEISGPKVDIDAPDVSIEGPDAKLKGPKFKMPEMNIKAPKISMPDIDFNLKGPKVKGDVDVSLPKVEGDLKGPEIDIKGPSLDIDTPDVNIEGPEGKLKGPKFKMPEMNIKAPKISMPDFDLHLKGPKVKGDVDVSLPKVESDLKGPEVDIEGPEGKLKGPKFKMPDVHFKSPQISMSDIDLNLKGPKIKGDMDISVPKLEGDLKGPKVDVKGPKVGIDTPDIDIHGPEGKLKGPKFKMPDLHLKAPKISMPEVDLNLKGPKVKGDMDISLPKVEGDLKGPEVDIRDPKVDIDVPDVDVQGPDWHLKMPKVKMPKFSMPGFKGEGPDVDVNLPKADIDVSGPKVDVDVPDVNIEGPDAKLKGPKFKMPEMSIKAPKISMPDIDLNLKGPKVKGDVDVTLPKVEGDLKGPEADIKGPKVDINTPDVDVHGPDWHLKMPKVKMPKFSMPGFKGEGPDVDVSLPKADIDVSGPKVDVDIPDVNIEGPDAKLKGPKFKMPEINIKAPKISIPDVDLDLKGPKVKGDFDVSVPKVEGTLKGPEVDLKGPRLDFEGPDAKLSGPSLKMPSLEISAPKVTAPDVDLHLKAPKIGFSGPKLEGGEVDLKGPKVEAPSLDVHMDSPDINIEGPDVKIPKFKKPKFGFGAKSPKADIKSPSLDVTVPEAELNLETPEISVGGKGKKSKFKMPKIHMSGPKIKAKKQGFDLNVPGGEIDASLKAPDVDVNIAGPDAALKVDVKSPKTKKTMFGKMYFPDVEFDIKSPKFKAEAPLPSPKLEGELQAPDLELSLPAIHVEGLDIKAKAPKVKMPDVDISVPKIEGDLKGPKVQANLGAPDINIEGLDAKVKTPSFGISAPQVSIPDVNVNLKGPKIKGDVPSVGLEGPDVDLQGPEAKIKFPKFSMPKIGIPGVKMEGGGAEVHAQLPSLEGDLRGPDVKLEGPDVSLKGPGVDLPSVNLSMPKVSGPDLDLNLKGPSLKGDLDASVPSMKVHAPGLNLSGVGGKMQVGGDGVKVPGIDATTKLNVGAPDVTLRGPSLQGDLAVSGDIKCPKVSVGAPDLSLEASEGSIKLPKMKLPQFGISTPGSDLHVNAKGPQVSGELKGPGVDVNLKGPRISAPNVDFNLEGPKVKGSLGATGEIKGPTVGGGLPGIGVQGLEGNLQMPGIKSSGCDVNLPGVNVKLPTGQISGPEIKGGLKGSEVGFHGAAPDISVKGPAFNMASPESDFGINLKGPKIKGGADVSGGVSAPDISLGEGHLSVKGSGGEWKGPQVSSALNLDTSKFAGGLHFSGPKVEGGVKGGQIGLQAPGLSVSGPQGHLESGSGKVTFPKMKIPKFTFSGRELVGREMGVDVHFPKAEASIQAGAGDGEWEESEVKLKKSKIKMPKFNFSKPKGKGGVTGSPEASISGSKGDLKSSKASLGSLEGEAEAEASSPKGKFSLFKSKKPRHRSNSFSDEREFSGPSTPTGTLEFEGGEVSLEGGKVKGKHGKLKFGTFGGLGSKSKGHYEVTGSDDETGKLQGSGVSLASKKSRLSSSSSNDSGNKVGIQLPEVELSVSTKKE

SEQ ID NO: 7 - protein, 359 aa, Homo sapiens
MLSAASRVVSRAAVHCALRSPPPEARALAMSRPPPPRVASVLGTMEMGRRMDAPASAAAVRAFLERGHTELDTAFMYSDGQSETILGGLGLGLGGGDCRVKIATKANPWDGKSLKPDSVRSQLETSLKRLQCPQVDLFYLHAPDHGTPVEETLHACQRLHQEGKFVELGLSNYASWEVAEICTLCKSNGWILPTVYQGMYNATTRQVETELFPCLRHFGLRFYAYNPLAGGLLTGKYKYEDKDGKQPVGRFFGNSWAETYRNRFWKEHHFEAIALVEKALQAAYGASAPSVTSAALRWMYHHSQLQGAHGDAVILGMSSLEQLEQNLAATEEGPLEPAVVDAFNQAWHLVAHECPNYFR

SEQ ID NO: 8 - protein, 298 aa, Homo sapiens
MVRMVPVLLSLLLLLGPAVPQENQDGRYSLTYIYTGLSKHVEDVPAFQALGSLNDLQFFRYNSKDRKSQPMGLWRQVEGMEDWKQDSQLQKAREDIFMETLKDIVEYYNDSNGSHVLQGRFGCEIENNRSSGAFWKYYYDGKDYIEFNKEIPAWVPFDPAAQITKQKWEAEPVYVQRAKAYLEEECPATLRKYLKYSKNILDRQDPPSVVVTSHQAPGEKKKLKCLAYDFYPGKIDVHWTRAGEVQEPELRGDVLHNGNGTYQSWVVVAVPPQDTAPYSCHVQHSSLAQPLVVPWEAS

SEQ ID NO: 9 - protein, 488 aa, Homo sapiens
MSYPGYPPTGYPPFPGYPPAGQESSFPPSGQYPYPSGFPPMGGGAYPQVPSSGYPGAGGYPAPGGYPAPGGYPGAPQPGGAPSYPGVPPGQGFGVPPGGAGFSGYPQPPSQSYGGGPAQVPLPGGFPGGQMPSQYPGGQPTYPSQINTDSFSSYPVFSPVSLDYSSEPATVTQVTQGTIRPAANFDAIRDAEILRKAMKGFGTDEQAIVDVVANRSNDQRQKIKAAFKTSYGKDLIKDLKSELSGNMEELILALFMPPTYYDAWSLRKAMQGAGTQERVLIEILCTRTNQEIREIVRCYQSEFGRDLEKDIRSDTSGHFERLLVSMCQGNRDENQSINHQMAQEDAQRLYQAGEGRLGTDESCFNMILATRSFPQLRATMEAYSRMANRDLLSSVSREFSGYVESGLKTILQCALNRPAFFAERLYYAMKGAGTDDSTLVRIVVTRSEIDLVQIKQMFAQMYQKTLGTMIAGDTSGDYRRLLLAIVGQ

SEQ ID NO: 10 - protein, 553 aa, Homo sapiens
MLSVRVAAAVVRALPRRAGLVSRNALGSSFIAARNFHASNTHLQKTGTAEMSSILEERILGADTSVDLEETGRVLSIGDGIARVHGLRNVQAEEMVEFSSGLKGMSLNLEPDNVGVVVFGNDKLIKEGDIVKRTGAIVDVPVGEELLGRVVDALGNAIDGKGPIGSKTRRRVGLKAPGIIPRISVREPMQTGIKAVDSLVPIGRGQRELIIGDRQTGKTSIAIDTIINQKRFNDGSDEKKKLYCIYVAIGQKRSTVAQLVKRLTDADAMKYTIVVSATASDAAPLQYLAPYSGCSMGEYFRDNGKHALIIYDDLSKQAVAYRQMSLLLRRPPGREAYPGDVFYLHSRLLERAAKMNDAFGGGSLTALPVIETQAGDVSAYIPTNVISITDGQIFLETELFYKGIRPAINVGLSVSRVGSAAQTRAMKQVAGTMKLELAQYREVAAFAQFGSDLDAATQQLLSRGVRLTELLKQGQYSPMAIEEQVAVIYAGVRGYLDKLEPSKITKFENAFLSHVVSQHQALLGTIRADGKISEQSDAKLKEIVTNFLAGFEA

SEQ ID NO: 11 - protein, 368 aa, Homo sapiens
MWPLWRLVSLLALSQALPFEQRGFWDFTLDDGPFMMNDEEASGADTSGVLDPDSVTPTYSAMCPFGCHCHLRVVQCSDLGLKSVPKEISPDTTLLDLQNNDISELRKDDFKGLQHLYALVLVNNKISKIHEKAFSPLRKLQKLYISKNHLVEIPPNLPSSLVELRIHDNRIRKVPKGVFSGLRNMNCIEMGGNPLENSGFEPGAFDGLKLNYLRISEAKLTGIPKDLPETLNELHLDHNKIQAIELEDLLRYSKLYRLGLGHNQIRMIENGSLSFLPTLRELHLDNNKLARVPSGLPDLKLLQVVYLHSNNITKVGVNDFCPMGFGVKRAYYNGISLFNNPVPYWEVQPATFRCVTDRLAIQFGNYKK

SEQ ID NO: 12 - protein, 882 aa, Homo sapiens
MGPWSRSLSALLLLLQVSSWLCQEPEPCHPGFDAESYTFTVPRRHLERGRVLGRVNFEDCTGRQRTAYFSLDTRFKVGTDGVITVKRPLRFHNPQIHFLVYAWDSTYRKFSTKVTLNTVGHHHRPPPHQASVSGIQAELLTFPNSSPGLRRQKRDWVIPPISCPENEKGPFPKNLVQIKSNKDKEGKVFYSITGQGADTPPVGVFIIERETGWLKVTEPLDRERIATYTLFSHAVSSNGNAVEDPMEILITVTDQNDNKPEFTQEVFKGSVMEGALPGTSVMEVTATDADDDVNTYNAAIAYTILSQDPELPDKNMFTINRNTGVISVVTTGLDRESFPTYTLVVQAADLQGEGLSTTATAVITVTDTNDNPPIFNPTTYKGQVPENEANVVITTLKVTDADAPNTPAWEAVYTILNDDGGQFVVTTNPVNNDGILKTAKGLDFEAKQQYILHVAVTNVVPFEVSLTTSTATVTVDVLDVNEAPIFVPPEKRVEVSEDFGVGQEITSYTAQEPDTFMEQKITYRIWRDTANWLEINPDTGAISTRAELDREDFEHVKNSTYTALIIATDNGSPVATGTGTLLLILSDVNDNAPIPEPRTIFFCERNPKPQVINIIDADLPPNTSPFTAELTHGASANWTIQYNDPTQESIILKPKMALEVGDYKINLKLMDNQNKDQVTTLEVSVCDCEGAAGVCRKAQPVEAGLQIPAILGILGGILALLILILLLLLFLRRRAVVKEPLLPPEDDTRDNVYYYDEEGGGEEDQDFDLSQLHRGLDARPEVTRNDVAPTLMSVPRYLPRPANPDEIGNFIDENLKAADTDPTAPPYDSLLVFDYEGSGSEAASLSSLNSSESDKDQDYDYLNEWGNRFKKLADMYGGGEDD

SEQ ID NO: 13 - protein, 3354 aa, Homo sapiens
MGRHVATSCHVAWLLVLISGCWGQVNRLPFFTNHFFDTYLLISEDTPVGSSVTQLLAQDMDNDPLVFGVSGEEASRFFAVEPDTGVVWLRQPLDRETKSEFTVEFSVSDHQGVITRKVNIQVGDVNDNAPTFHNQPYSVRIPENTPVGTPIFIVNATDPDLGAGGSVLYSFQPPSQFFAIDSARGIVTVIRELDYETTQAYQLTVNATDQDKTRPLSTLANLAIIITDVQDMDPIFINLPYSTNIYEHSPPGTTVRIITAIDQDKGRPRGIGYTIVSGNTNSIFALDYISGVLTLNGLLDRENPLYSHGFILTVKGTELNDDRTPSDATVTTTFNILVIDINDNAPEFNSSEYSVAITELAQVGFALPLFIQVVDKDENLGLNSMFEVYLVGNNSHHFIISPTSVQGKADIRIRVAIPLDYETVDRYDFDLFANESVPDHVGYAKVKITLINENDNRPIFSQPLYNISLYENVTVGTSVLTVLATDNDAGTFGEVSYFFSDDPDRFSLDKDTGLIMLIARLDYELIQRFTLTIIARDGGGEETTGRVRINVLDVNDNVPTFQKDAYVGALRENEPSVTQLVRLRATDEDSPPNNQITYSIVSASAFGSYFDISLYEGYGVISVSRPLDYEQISNGLIYLTVMAMDAGNPPLNSTVPVTIEVFDENDNPPTFSKPAYFVSVVENIMAGATVLFLNATDLDRSREYGQESIIYSLEGSTQFRINARSGEITTTSLLDRETKSEYILIVRAVDGGVGHNQKTGIATVNITLLDINDNHPTWKDAPYYINLVEMTPPDSDVTTVVAVDPDLGENGTLVYSIQPPNKFYSLNSTTGKIRTTHAMLDRENPDPHEAELMRKIVVSVTDCGRPPLKATSSATVFVNLLDLNDNDPTFQNLPFVAEVLEGIPAGVSIYQVVAIDLDEGLNGLVSYRMPVGMPRMDFLINSSSGVVVTTTELDRERIAEYQLRVVASDAGTPTKSSTSTLTIHVLDVNDETPTFFPAVYNVSVSEDVPREFRVVWLNCTDNDVGLNAELSYFITGGNVDGKFSVGYRDAVVRTVVGLDRETTAAYMLILEAIDNGPVGKRHTGTATVFVTVLDVNDNRPIFLQSSYEASVPEDIPEGHSILQLKATDADEGEFGRVWYRILHGNHGNNFRIHVSNGLLMRGPRPLDRERNSSHVLIVEAYNHDLGPMRSSVRVIVYVEDINDEAPVFTQQQYSRLGLRETAGIGTSVIVVQATDRDSGDGGLVNYRILSGAEGKFEIDESTGLIITVNYLDYETKTSYMMNVSATDQAPPFNQGFCSVYITLLNELDEAVQFSNASYEAAILENLALGTEIVRVQAYSIDNLNQITYRFDAYTSTQAKALFKIDAITGVITVQGLVDREKGDFYTLTVVADDGGPKVDSTVKVYITVLDENDNSPRFDFTSDSAVSIPEDCPVGQRVATVKAWDPDAGSNGQVVFSLASGNIAGAFEIVTTNDSIGEVFVARPLDREELDHYILQVVASDRGTPPRKKDHILQVTILDINDNPPVIESPFGYNVSVNENVGGGTAVVQVRATDRDIGINSVLSYYITEGNKDMTFRMDRISGEIATRPAPPDRERQSFYHLVATVEDEGTPTLSATTHVYVTIVDENDNAPMFQQPHYEVLLDEGPDTLNTSLITIQALDLDEGPNGTVTYAIVAGNIVNTFRIDRHMGVITAAKELDYEISHGRYTLIVTATDQCPILSHRLTSTTTVLVNVNDINDNVPTFPRDYEGPFEVTEGQPGPRVWTFLAHDRDSGPNGQVEYSIMDGDPLGEFVISPVEGVLRVRKDVELDRETIAFYNLTICARDRGMPPLSSTMLVGIRVLDINDNDPVLLNLPMNITISENSPVSSFVAHVLASDADSGCNARLTFNITAGNRERAFFINATTGIVTVNRPLDRERIPEYKLTISVKDNPENPRIARRDYDLLLIFLSDENDNHPLFTKSTYQAEVMENSPAGTPLTVLNGPILALDADQDIYAVVTYQLLGAQSGLFDINSSTGVVTVRSGVIIDREAFSPPILELLLLAEDIGLLNSTAHLLITILDDNDNRPTFSPATLTVHLLENCPPGFSVLQVTATDEDSGLNGELVYRIEAGAQDRFLIHLVTGVIRVGNATIDREEQESYRLTVVATDRGTVPLSGTAIVTILIDDINDSRPEFLNPIQTVSVLESAEPGTVIANITAIDHDLNPKLEYHIVGIVAKDDTDRLVPNQEDAFAVNINTGSVMVKSPMNRELVATYEVTLSVIDNASDLPERSVSVPNAKLTVNVLDVNDNTPQFKPFGITYYMERILEGATPGTTLIAVAAVDPDKGLNGLVTYTLLDLVPPGYVQLEDSSAGKVIANRTVDYEEVHWLNFTVRASDNGSPPRAAEIPVYLEIVDINDNNPIFDQPSYQEAVFEDVPVGTIILTVTATDADSGNFALIEYSLGDGESKFAINPTTGDIYVLSSLDREKKDHYILTALAKDNPGDVASNRRENSVQVVIQVLDVNDCRPQFSKPQFSTSVYENEPAGTSVITMMATDQDEGPNGELTYSLEGPGVEAFHVDMDSGLVTTQRPLQSYEKFSLTVVATDGGEPPLWGTTMLLVEVIDVNDNRPVFVRPPNGTILHIREEIPLRSNVYEVYATDKDEGLNGAVRYSFLKTAGNRDWEFFIIDPISGLIQTAQRLDRESQAVYSLILVASDLGQPVPYETMQPLQVALEDIDDNEPLFVRPPKGSPQYQLLTVPEHSPRGTLVGNVTGAVDADEGPNAIVYYFIAAGNEEKNFHLQPDGCLLVLRDLDREREAIFSFIVKASSNRSWTPPRGPSPTLDLVADLTLQEVRVVLEDINDQPPRFTKAEYTAGVATDAKVGSELIQVLALDADIGNNSLVFYSILAIHYFRALANDSEDVGQVFTMGSMDGILRTFDLFMAYSPGYFVVDIVARDLAGHNDTAIIGIYILRDDQRVKIVINEIPDRVRGFEEEFIHLLSNITGAIVNTDNVQFHVDKKGRVNFAQTELLIHVVNRDTNRILDVDRVIQMIDENKEQLRNLFRNYNVLDVQPAISVRLPDDMSALQMAIIVLAILLFLAAMLFVLMNWYYRTVHKRKLKAIVAGSAGNRGFIDIMDMPNTNKYSFDGANPVWLDPFCRNLELAAQAEHEDDLPENLSEIADLWNSPTRTHGTFGREPAAVKPDDDRYLRAAIQEYDNIAKLGQIIREGPIKGSLLKVVLEDYLRLKKLFAQRMVQKASSCHSSISELIQTELDEEPGDHSPGQGSLRFRHKPPVELKGPDGIHVVHGSTGTLLATDLNSLPEEDQKGLGRSLETLTAAEATAFERNARTESAKSTPLHKLRDVIMETPLEITEL

SEQ ID NO: 14 - protein, 2225 aa, Homo sapiens
MAALVLEDGSVLRGQPFGAAVSTAGEVVFQTGMVGYPEALTDPSYKAQILVLTYPLIGNYGIPPDEMDEFGLCKWFESSGIHVAALVVGECCPTPSHWSATRTLHEWLQQHGIPGLQGVDTRELTKKLREQGSLLGKLVQNGTEPSSLPFLDPNARPLVPEVSIKTPRVFNTGGAPRILALDCGLKYNQIRCLCQRGAEVTVVPWDHALDSQEYEGLFLSNGPGDPASYPSVVSTLSRVLSEPNPRPVFGICLGHQLLALAIGAKTYKMRYGNRGHNQPCLLVGSGRCFLTSQNHGFAVETDSLPADWAPLFTNANDGSNEGIVHNSLPFFSVQFHPEHQAGPSDMELLFDIFLETVKEATAGNPGGQTVRERLTERLCPPGIPTPGSGLPPPRKVLILGSGGLSIGQAGEFDYSGSQAIKALKEENIQTLLINPNIATVQTSQGLADKVYFLPITPHYVTQVIRNERPDGVLLTFGGQTALNCGVELTKAGVLARYGVRVLGTPVETIELTEDRRAFAARMAEIGEHVAPSEAANSLEQAQAAAERLGYPVLVRAAFALGGLGSGFASNREELSALVAPAFAHTSQVLVDKSLKGWKEIEYEVVRDAYGNCVTVCNMENLDPLGIHTGESIVVAPSQTLNDREYQLLRQTAIKVTQHLGIVGECNVQYALNPESEQYYIIEVNARLSRSSALASKATGYPLAYVAAKLALGIPLPELRNSVTGGTAAFEPSVDYCVVKIPRWDLSKFLRVSTKIGSCMKSVGEVMGIGRSFEEAFQKALRMVDENCVGFDHTVKPVSDMELETPTDKRIFVVAAALWAGYSVDRLYELTRIDRWFLHRMKRIIAHAQLLEQHRGQPLPPDLLQQAKCLGFSDKQIALAVLSTELAVRKLRQELGICPAVKQIDTVAAEWPAQTNYLYLTYWGTTHDLTFRTPHVLVLGSGVYRIGSSVEFDWCAVGCIQQLRKMGYKTIMVNYNPETVSTDYDMCDRLYFDEISFEVVMDIYELENPEGVILSMGGQLPNNMAMALHRQQCRVLGTSPEAIDSAENRFKFSRLLDTIGISQPQWRELSDLESARQFCQTVGYPCVVRPSYVLSGAAMNVAYTDGDLERFLSSAAAVSKEHPVVISKFIQEAKEIDVDAVASDGVVAAIAISEHVENAGVHSGDATLVTPPQDITAKTLERIKAIVHAVGQELQVTGPFNLQLIAKDDQLKVIECNVRVSRSFPFVSKTLGVDLVALATRVIMGEEVEPVGLMTGSGVVGVKVPQFSFSRLAGADVVLGVEMTSTGEVAGFGESRCEAYLKAMLSTGFKIPKKNILLTIGSYKNKSELLPTVRLLESLGYSLYASLGTADFYTEHGVKVTAVDWHFEEAVDGECPPQRSILEQLAEKNFELVINLSMRGAGGRRLSSFVTKGYRTRRLAADFSVPLIIDIKCTKLFVEALGQIGPAPPLKVHVDCMTSQKLVRLPGLIDVHVHLREPGGTHKEDFASGTAAALAGGITMVCAMPNTRPPIIDAPALALAQKLAEAGARCDFALFLGASSENAGTLGTVAGSAAGLKLYLNETFSELRLDSVVQWMEHFETWPSHLPIVAHAEQQTVAAVLMVAQLTQRSVHICHVARKEEILLIKAAKARGLPVTCEVAPHHLFLSHDDLERLGPGKGEVRPELGSRQDVEALWENMAVIDCFASDHAPHTLEEKCGSRPPPGFPGLETMLPLLLTAVSEGRLSLDDLLQRLHHNPRRIFHLPPQEDTYVEVDLEHEWTIPSHMPFSKAHWTPFEGQKVKGTVRRVVLRGEVAYIDGQVLVPPGYGQDVRKWPQGAVPQLPPSAPATSEMTTTPERPRRGIPGLPDGRFHLPPRIHRASDPGLPAEEPKEKSSRKVAEPELMGTPDGTCYPPPPVPRQASPQNLGTPGLLHPQTSPLLHSLVGQHILSVQQFTKDQMSHLFNVAHTLRMMVQKERSLDILKGKVMASMFYEVSTRTSSSFAAAMARLGGAVLSFSEATSSVQKGESLADSVQTMSCYADVVVLRHPQPGAVELAAKHCRRPVINAGDGVGEHPTQALLDIFTIREELGTVNGMTITMVGDLKHGRTVHSLACLLTQYRVSLRYVAPPSLRMPPTVRAFVASRGTKQEEFESIEEALPDTDVLYMTRIQKERFGSTQEYEACFGQFILTPHIMTRAKKKMVVMHPMPRVNEISVEVDSDPRAAYFRQAENGMYIRMALLATVLGRF

SEQ ID NO: 15 - protein, 277 aa, Homo sapiens
MSSGIHVALVTGGNKGIGLAIVRDLCRLFSGDVVLTARDVTRGQAAVQQLQAEGLSPRFHQLDIDDLQSIRALRDFLRKEYGGLDVLVNNAGIAFKVADPTPFHIQAEVTMKTNFFGTRDVCTELLPLIKPQGRVVNVSSIMSVRALKSCSPELQQKFRSETITEEELVGLMNKFVEDTKKGVHQKEGWPSSAYGVTKIGVTVLSRIHARKLSEQRKGDKILLNACCPGWVRTDMAGPKATKSPEEGAETPVYLALLPPDAEGPHGQFVSEKRVEQW

SEQ ID NO: 16 - protein, 4069 aa, Homo sapiens
MASRDSNHAGESFLGSDGDEEATRELETEEESEGEEDETAAESEEEPDSRLSDQDEEGKIKQEYIISDPSFSMVTVQREDSGITWETNSSRSSTPWASEESQTSGVCSREGSTVNSPPGNVSFIVDEVKKVRKRTHKSKHGSPSLRRKGNRKRNSFESQDVPTNKKGSPLTSASQVLTTEKEKSYTGIYDKARKKKTTSNTPPITGAIYKEHKPLVLRPVYIGTVQYKIKMFNSVKEELIPLQFYGTLPKGYVIKEIHYRKGKDASISLEPDLDNSGSNTVSKTRKLVAQSIEDKVKEVFPPWRGALSKGSESLTLMFSHEDQKKIYADSPLNATSALEHTVPSYSSSGRAEQGIQLRHSQSVPQQPEDEAKPHEVEPPSVTPDTPATMFLRTTKEECELASPGTAASENDSSVSPSFANEVKKEDVYSAHHSISLEAASPGLAASTQDGLDPDQEQPDLTSIERAEPVSAKLTPTHPSVKGEKEENMLEPSISLSEPLMLEEPEKEEIETSLPIAITPEPEDSNLVEEEIVELDYPESPLVSEKPFPPHMSPEVEHKEEELILPLLAASSPEHVALSEEEREEIASVSTGSAFVSEYSVPQDLNHELQEQEGEPVPPSNVEAIAEHAVLSEEENEEFEAYSPAAAPTSESSLSPSTTEKTSENQSPLFSTVTPEYMVLSGDEASESGCYTPDSTSASEYSVPSLATKESLKKTIDRKSPLILKGVSEYMIPSEEKEDTGSFTPAVAPASEPSLSPSTTEKTSECQSPLPSTATSEHVVPSEGEDLGSERFTPDSKLISKYAAPLNATQESQKKIINEASQFKPKGISEHTVLSVDGKEVIGPSSPDLVVASEHSFPPHTTEMTSECQAPPLSATPSEYVVLSDEEAVELERYTPSSTSASEFSVPPYATPEAQEEEIVHRSLNLKGASSPMNLSEEDQEDIGPFSPDSAFVSEFSFPPYATQEAEKREFECDSPICLTSPSEHTILSDEDTEEAELFSPDSASQVSIPPFRISETEKNELEPDSLLTAVSASGYSCFSEADEEDIGSTAATPVSEQFSSSQKQKAETFPLMSPLEDLSLPPSTDKSEKAEIKPEIPTTSTSVSEYLILAQKQKTQAYLEPESEDLIPSHLTSEVEKGEREASSSVAAIPAALPAQSSIVKEETKPASPHSVLPDSVPAIKKEQEPTAALTLKAADEQMALSKVRKEEIVPDSQEATAHVSQDQKMEPQPPNVPESEMKYSVLPDMVDEPKKGVKPKLVLNVTSELEQRKLSKNEPEVIKPYSPLKETSLSGPEALSAVKMEMKHDSKITTTPIVLHSASSGVEKQVEHGPPALAFSALSEEIKKEIEPSSSTTTASVTKLDSNLTRAVKEEIPTDSSLITPVDRPVLTKVGKGELGSGLPPLVTSADEHSVLAEEDKVAIKGASPIETSSKHLAWSEAEKEIKFDSLPSVSSIAEHSVLSEVEAKEVKAGLPVIKTSSSQHSDKSEEARVEDKQDLLFSTVCDSERLVSSQKKSLMSTSEVLEPEHELPLSLWGEIKKKETELPSSQNVSPASKHIIPKGKDEETASSSPELENLASGLAPTLLLLSDDKNKPAVEVSSTAQGDFPSEKQDVALAELSLEPEKKDKPHQPLELPNAGSEFSSDLGRQSGSIGTKQAKSPITETEDSVLEKGPAELRSREGKEENRELCASSTMPAISELSSLLREESQNEEIKPFSPKIISLESKEPPASVAEGGNPEEFQPFTFSLKGLSEEVSHPADFKKGGNQEIGPLPPTGNLKAQVMGDILDKLSEETGHPNSSQVLQSITEPSKIAPSDLLVEQKKTEKALHSDQTVKLPDVSTSSEDKQDLGIKQFSLMRENLPLEQSKSFMTTKPADVKETKMEEFFISPKDENWMLGKPENVASQHEQRIAGSVQLDSSSSNELRPGQLKAAVSSKDHTCEVRKQVLPHSAEESHLSSQEAVSALDTSSGNTETLSSKSYSSEEVKLAEEPKSLVLAGNVERNIAEGKEIHSLMESESLLLEKANTELSWPSKEDSQEKIKLPPERFFQKPVSGLSVEQVKSETISSSVKTAHFPAEGVEPALGNEKEAHRSTPPFPEEKPLEESKMVQSKVIDDADEGKKPSPEVKIPTQRKPISSIHAREPQSPESPEVTQNPPTQPKVAKPDLPEEKGKKGISSFKSWMSSLFFGSSTPDNKVAEQEDLETQPSPSVEKAVTVIDPEGTIPTNFNVAEKPADHSLSEVKLKTADEPRGTLVKSGDGQNVKEKSMILSNVEDLQQPKFISEVSREDYGKKEISGDSEEMNINSVVTSADGENLEIQSYSLIGEKLVMEEAKTIVPPHVTDSKRVQKPAIAPPSKWNISIFKEEPRSDQKQKSLLSFDVVDKVPQQPKSASSNFASKNITKESEKPESIILPVEESKGSLIDFSEDRLKKEMQNPTSLKISEEETKLRSVSPTEKKDNLENRSYTLAEKKVLAEKQNSVAPLELRDSNEIGKTQITLGSRSTELKESKADAMPQHFYQNEDYNERPKIIVGSEKEKGEEKENQVYVLSEGKKQQEHQPYSVNVAESMSRESDISLGHSLGETQSFSLVKATSVTEKSEAMLAEAHPEIREAKAVGTQPHPLEESKVLVEKTKTFLPVALSCRDEIENHSLSQEGNLVLEKSSRDMPDHSEEKEQFRESELSKGGSVDITKETVKQGFQEKAVGTQPRPLEESKVLVEKTKTFLPVVLSCHDEIENHSLSQEGNLVLEKSSRDMPDHSEEKEQFKESELWKGGSVDITKESMKEGFPSKESERTLARPFDETKSSETPPYLLSPVKPQTLASGASPEINAVKKKEMPRSELTPERHTVHTIQTSKDDTSDVPKQSVLVSKHHLEAAEDTRVKEPLSSAKSNYAQFISNTSASNADKMVSNKEMPKEPEDTYAKGEDFTVTSKPAGLSEDQKTAFSIISEGCEILNIHAPAFISSIDQEESEQMQDKLEYLEEKASFKTIPLPDDSETVACHKTLKSRLEDEKVTPLKENKQKETHKTKEEISTDSETDLSFIQPTIPSEEDYFEKYTLIDYNISPDPEKQKAPQKLNVEEKLSKEVTEETISFPVSSVESALEHEYDLVKLDESFYGPEKGHNILSHPETQSQNSADRNVSKDTKRDVDSKSPGMPLFEAEEGVLSRTQIFPTTIKVIDPEFLEEPPALAFLYKDLYEEAVGEKKKEEETASEGDSVNSEASFPSRNSDTDDGTGIYFEKYILKDDILHDTSLTQKDQGQGLEEKRVGKDDSYQPIAAEGEIWGKFGTICREKSLEEQKGVYGEGESVDHVETVGNVAMQKKAPITEDVRVATQKISYAVPFEDTHHVLERADEAGSHGNEVGNASPEVNLNVPVQVSFPEEEFASGATHVQETSLEEPKILVPPEPSEERLRNSPVQDEYEFTESLHNEVVPQDILSEELSSESTPEDVLSQGKESFEHISENEFASEAEQSTPAEQKELGSERKEEDQLSSEVVTEKAQKELKKSQIDTYCYTCKCPISATDKVFGTHKDHEVSTLDTAISAVKVQLAEFLENLQEKSLRIEAFVSEIESFFNTIEENCSKNEKRLEEQNEEMMKKVLAQYDEKAQSFEEVKKKKMEFLHEQMVHFLQSMDTAKDTLETIVREAEELDEAVFLTSFEEINERLLSAMESTASLEKMPAAFSLFEHYDDSSARSDQMLKQVAVPQPPRLEPQEPNSATSTTIAVYWSMNKEDVIDSFQVYCMEEPQDDQEVNELVEEYRLTVKESYCIFEDLEPDRCYQVWVMAVNFTGCSLPSERAIFRTAPSTPVIRAEDCTVCWNTATIRWRPTTPEATETYTLEYCRQHSPEGEGLRSFSGIKGLQLKVNLQPNDNYFFYVRAINAFGTSEQSEAALISTRGTRFLLLRETAHPALHISSSGTVISFGERRRLTEIPSVLGEELPSCGQHYWETTVTDCPAYRLGICSSSAVQAGALGQGETSWYMHCSEPQRYTFFYSGIVSDVHVTERPARVGILLDYNNQRLIFINAESEQLLFIIRHRFNEGVHPAFALEKPGKCTLHLGIEPPDSVRHK

SEQ ID NO: 17 - protein, 906 aa, Homo sapiens
MTAVHAGNINFKWDPKSLEIRTLAVERLLEPLVTQVTTLVNTNSKGPSNKKRGRSKKAHVLAASVEQATENFLEKGDKIAKESQFLKEELVAAVEDVRKQGDLMKAAAGEFADDPCSSVKRGNMVRAARALLSAVTRLLILADMADVYKLLVQLKVVEDGILKLRNAGNEQDLGIQYKALKPEVDKLNIMAAKRQQELKDVGHRDQMAAARGILQKNVPILYTASQACLQHPDVAAYKANRDLIYKQLQQAVTGISNAAQATASDDASQHQGGGGGELAYALNNFDKQIIVDPLSFSEERFRPSLEERLESIISGAALMADSSCTRDDRRERIVAECNAVRQALQDLLSEYMGNAGRKERSDALNSAIDKMTKKTRDLRRQLRKAVMDHVSDSFLETNVPLLVLIEAAKNGNEKEVKEYAQVFREHANKLIEVANLACSISNNEEGVKLVRMSASQLEALCPQVINAALALAAKPQSKLAQENMDLFKEQWEKQVRVLTDAVDDITSIDDFLAVSENHILEDVNKCVIALQEKDVDGLDRTAGAIRGRAARVIHVVTSEMDNYEPGVYTEKVLEATKLLSNTVMPRFTEQVEAAVEALSSDPAQPMDENEFIDASRLVYDGIRDIRKAVLMIRTPEELDDSDFETEDFDVRSRTSVQTEDDQLIAGQSARAIMAQLPQEQKAKIAEQVASFQEEKSKLDAEVSKWDDSGNDIIVLAKQMCMIMMEMTDFTRGKGPLKNTSDVISAAKKIAEAGSRMDKLGRTIADHCPDSACKQDLLAYLQRIALYCHQLNICSKVKAEVQNLGGELVVSGVDSAMSLIQAAKNLMNAVVQTVKASYVASTKYQKSQGMASLNLPAVSWKMKAPEKKPLVKREKQDETQTKIKRASQKKHVNPVQALSEFKAMDSI

SEQ ID NO: 18 - protein, 781 aa, Homo sapiens
MATQADLMELDMAMEPDRKAAVSHWQQQSYLDSGIHSGATTTAPSLSGKGNPEEEDVDTSQVLYEWEQGFSQSFTQEQVADIDGQYAMTRAQRVRAAMFPETLDEGMQIPSTQFDAAHPTNVQRLAEPSQMLKHAVVNLINYQDDAELATRAIPELTKLLNDEDQVVVNKAAVMVHQLSKKEASRHAIMRSPQMVSAIVRTMQNTNDVETARCTAGTLHNLSHHREGLLAIFKSGGIPALVKMLGSPVDSVLFYAITTLHNLLLHQEGAKMAVRLAGGLQKMVALLNKTNVKFLAITTDCLQILAYGNQESKLIILASGGPQALVNIMRTYTYEKLLWTTSRVLKVLSVCSSNKPAIVEAGGMQALGLHLTDPSQRLVQNCLWTLRNLSDAATKQEGMEGLLGTLVQLLGSDDINVVTCAAGILSNLTCNNYKNKMMVCQVGGIEALVRTVLRAGDREDITEPAICALRHLTSRHQEAEMAQNAVRLHYGLPVVVKLLHPPSHWPLIKATVGLIRNLALCPANHAPLREQGAIPRLVQLLVRAHQDTQRRTSMGGTQQQFVEGVRMEEIVEGCTGALHILARDVHNRIVIRGLNTIPLFVQLLYSPIENIQRVAAGVLCELAQDKEAAEAIEAEGATAPLTELLHSRNEGVATYAAAVLFRMSEDKPQDYKKRLSVELTSSLFRTEPMAWNETADLGLDIGAQGEPLGYRQDDPSYRSFHSGGYGQDALGMDPMMEHEMGGHHPGADYPVDGLPDLGHAQDLMDGLPPGDSNQLAWFDTDL

SEQ ID NO: 19 - protein, 2701 aa, Homo sapiens
MAEEGAVAVCVRVRPLNSREESLGETAQVYWKTDNNVIYQVDGSKSFNFDRVFHGNETTKNVYEEIAAPIIDSAIQGYNGTIFAYGQTASGKTYTMMGSEDHLGVIPRAIHDIFQKIKKFPDREFLLRVSYMEIYNETITDLLCGTQKMKPLIIREDVNRNVYVADLTEEVVYTSEMALKWITKGEKSRHYGETKMNQRSSRSHTIFRMILESREKGEPSNCEGSVKVSHLNLVDLAGSERAAQTGAAGVRLKEGCNINRSLFILGQVIKKLSDGQVGGFINYRDSKLTRILQNSLGGNAKTRIICTITPVSFDETLTALQFASTAKYMKNTPYVNEVSTDEALLKRYRKEIMDLKKQLEEVSLETRAQAMEKDQLAQLLEEKDLLQKVQNEKIENLTRMLVTSSSLTLQQELKAKRKRRVTWCLGKINKMKNSNYADQFNIPTNITTKTHKLSINLLREIDESVCSESDVFSNTLDTLSEIEWNPATKLLNQENIESELNSLRADYDNLVLDYEQLRTEKEEMELKLKEKNDLDEFEALERKTKKDQEMQLIHEISNLKNLVKHAEVYNQDLENELSSKVELLREKEDQIKKLQEYIDSQKLENIKMDLSYSLESIEDPKQMKQTLFDAETVALDAKRESAFLRSENLELKEKMKELATTYKQMENDIQLYQSQLEAKKKMQVDLEKELQSAFNEITKLTSLIDGKVPKDLLCNLELEGKITDLQKELNKEVEENEALREEVILLSELKSLPSEVERLRKEIQDKSEELHIITSEKDKLFSEVVHKESRVQGLLEEIGKTKDDLATTQSNYKSTDQEFQNFKTLHMDFEQKYKMVLEENERMNQEIVNLSKEAQKFDSSLGALKTELSYKTQELQEKTREVQERLNEMEQLKEQLENRDSTLQTVEREKTLITEKLQQTLEEVKTLTQEKDDLKQLQESLQIERDQLKSDIHDTVNMNIDTQEQLRNALESLKQHQETINTLKSKISEEVSRNLHMEENTGETKDEFQQKMVGIDKKQDLEAKNTQTLTADVKDNEIIEQQRKIFSLIQEKNELQQMLESVIAEKEQLKTDLKENIEMTIENQEELRLLGDELKKQQEIVAQEKNHAIKKEGELSRTCDRLAEVEEKLKEKSQQLQEKQQQLLNVQEEMSEMQKKINEIENLKNELKNKELTLEHMETERLELAQKLNENYEEVKSITKERKVLKELQKSFETERDHLRGYIREIEATGLQTKEELKIAHIHLKEHQETIDELRRSVSEKTAQIINTQDLEKSHTKLQEEIPVLHEEQELLPNVKEVSETQETMNELELLTEQSTTKDSTTLARIEMERLRLNEKFQESQEEIKSLTKERDNLKTIKEALEVKHDQLKEHIRETLAKIQESQSKQEQSLNMKEKDNETTKIVSEMEQFKPKDSALLRIEIEMLGLSKRLQESHDEMKSVAKEKDDLQRLQEVLQSESDQLKENIKEIVAKHLETEEELKVAHCCLKEQEETINELRVNLSEKETEISTIQKQLEAINDKLQNKIQEIYEKEEQFNIKQISEVQEKVNELKQFKEHRKAKDSALQSIESKMLELTNRLQESQEEIQIMIKEKEEMKRVQEALQIERDQLKENTKEIVAKMKESQEKEYQFLKMTAVNETQEKMCEIEHLKEQFETQKLNLENIETENIRLTQILHENLEEMRSVTKERDDLRSVEETLKVERDQLKENLRETITRDLEKQEELKIVHMHLKEHQETIDKLRGIVSEKTNEISNMQKDLEHSNDALKAQDLKIQEELRIAHMHLKEQQETIDKLRGIVSEKTDKLSNMQKDLENSNAKLQEKIQELKANEHQLITLKKDVNETQKKVSEMEQLKKQIKDQSLTLSKLEIENLNLAQKLHENLEEMKSVMKERDNLRRVEETLKLERDQLKESLQETKARDLEIQQELKTARMLSKEHKETVDKLREKISEKTIQISDIQKDLDKSKDELQKKIQELQKKELQLLRVKEDVNMSHKKINEMEQLKKQFEAQNLSMQSVRMDNFQLTKKLHESLEEIRIVAKERDELRRIKESLKMERDQFIATLREMIARDRQNHQVKPEKRLLSDGQQHLTESLREKCSRIKELLKRYSEMDDHYECLNRLSLDLEKEIEFQKELSMRVKANLSLPYLQTKHIEKLFTANQRCSMEFHRIMKKLKYVLSYVTKIKEEQHESINKFEMDFIDEVEKQKELLIKIQHLQQDCDVPSRELRDLKLNQNMDLHIEEILKDFSESEFPSIKTEFQQVLSNRKEMTQFLEEWLNTRFDIEKLKNGIQKENDRICQVNNFFNNRIIAIMNESTEFEERSATISKEWEQDLKSLKEKNEKLFKNYQTLKTSLASGAQVNPTTQDNKNPHVTSRATQLTTEKIRELENSLHEAKESAMHKESKIIKMQKELEVTNDIIAKLQAKVHESNKCLEKTKETIQVLQDKVALGAKPYKEEIEDLKMKLVKIDLEKMKNAKEFEKEISATKATVEYQKEVIRLLRENLRRSQQAQDTSVISEHTDPQPSNKPLTCGGGSGIVQNTKALILKSEHIRLEKEISKLKQQNEQLIKQKNELLSNNQHLSNEVKTWKERTLKREAHKQVTCENSPKSPKVTGTASKKKQITPSQCKERNLQDPVPKESPKSCFFDSRSKSLPSPHPVRYFDNSSLGLCPEVQNAGAESVDSQPGPWHASSGKDVPECKTQ

SEQ ID NO: 20 - protein, 951 aa, Homo sapiens
MSAREVAVLLLWLSCYGSALWRYSTNSPNYRIFSTRSTIKLEYEGTLFTEWSVPETCFVLNKSSPTTELRCSSPGVHAIKPIVTGPDEEERYLFVESSHTCFLWYYRVRHFFNNFTQLITVWAYDPESADPDELLGNAEEPSINSIVLSTQMATLGQKPVIHTVLKRKVYSSNEKMRRGTWRIVVPMTKDDALKEIRGNQVTFQDCFIADFLILLTFPLLTIPEIPGYLPISSPRGSQLMASWDACVVASAVLVTDMETFHTTDSFKSWTRIRVPPDILSDDERRSVAHVILSRDGIVFLINGVLYIKSFRGFIRLGGIVNLPDGGITGISSRKWCWVNYLLKAKGRRSTFAVWTENEIYLGSILLKFARLVTTTELKNILSLSVTATLTIDRVEYTGHPLEIAVFLNYCTVCNVTKKIFLVIYNEDTKQWVSQDFTLDAPIDSVTMPHFTFSALPGLLLWNKHSIYYCYHNFTFTGILQTPAGHGNLSMLSNDSIIHEVFIDYYGDILVKMENNVIFYSKINTRDAVKLHLWTNYTTRAFIFLSTSGQTYFLYALDDGTIQIQDYPLHLEAQSIAFTTKDKCPYMAFHNNVAHVFYFLDKGEALTVWTQIVYPENTGLYVIVESYGPKILQESHEISFEAAFGYCTKTLTLTFYQNVDYERISDYFETQDKHTGLVLVQFRPSEYSKACPIAQKVFQIAVGCDDKKFIAIKGFSKKGCHHHDFSYVIEKSYLRHQPSKNLRVRYIWGEYGCPLRLDFTEKFQPVVQLFDDNGYVKDVEANFIVWEIHGRDDYSFNNTMAQSGCLHEAQTWKSMIELNKHLPLEEVWGPENYKHCFSYAIGKPGDLNQPYEIINSSNGNHIFWPMGHSGMYVFRVKILDPNYSFCNLTAMFAIETFGLIPSPSVYLVASFLFVLMLLFFTILVLSYFRYMRIYRRYIYEPLHKPQRKRKKN

SEQ ID NO: 21 - protein, 1224 aa, Homo sapiens
MLTKFETKSARVKGLSFHPKRPWILTSLHNGVIQLWDYRMCTLIDKFDEHDGPVRGIDFHKQQPLFVSGGDDYKIKVWNYKLRRCLFTLLGHLDYIRTTFFHHEYPWILSASDDQTIRVWNWQSRTCVCVLTGHNHYVMCAQFHPTEDLVVSASLDQTVRVWDISGLRKKNLSPGAVESDVRGITGVDLFGTTDAVVKHVLEGHDRGVNWAAFHPTMPLIVSGADDRQVKIWRMNESKAWEVDTCRGHYNNVSCAVFHPRQELILSNSEDKSIRVWDMSKRTGVQTFRRDHDRFWVLAAHPNLNLFAAGHDGGMIVFKLERERPAYAVHGNMLHYVKDRFLRQLDFNSSKDVAVMQLRSGSKFPVFNMSYNPAENAVLLCTRASNLENSTYDLYTIPKDADSQNPDAPEGKRSSGLTAVWVARNRFAVLDRMHSLLIKNLKNEITKKVQVPNCDEIFYAGTGNLLLRDADSITLFDVQQKRTLASVKISKVKYVIWSADMSHVALLAKHAIVICNRKLDALCNIHENIRVKSGAWDESGVFIYTTSNHIKYAVTTGDHGIIRTLDLPIYVTRVKGNNVYCLDRECRPRVLTIDPTEFKFKLALINRKYDEVLHMVRNAKLVGQSIIAYLQKKGYPEVALHFVKDEKTRFSLALECGNIEIALEAAKALDDKNCWEKLGEVALLQGNHQIVEMCYQRTKNFDKLSFLYLITGNLEKLRKMMKIAEIRKDMSGHYQNALYLGDVSERVRILKNCGQKSLAYLTAATHGLDEEAESLKETFDPEKETIPDIDPNAKLLQPPAPIMPLDTNWPLLTVSKGFFEGTIASKGKGGALAADIDIDTVGTEGWGEDAELQLDEDGFVEATEGLGDDALGKGQEEGGGWDVEEDLELPPELDISPGAAGGAEDGFFVPPTKGTSPTQIWCNNSQLPVDHILAGSFETAMRLLHDQVGVIQFGPYKQLFLQTYARGRTTYQALPCLPSMYGYPNRNWKDAGLKNGVPAVGLKLNDLIQRLQLCYQLTTVGKFEEAVEKFRSILLSVPLLVVDNKQEIAEAQQLITICREYIVGLSVETERKKLPKETLEQQKRICEMAAYFTHSNLQPVHMILVLRTALNLFFKLKNFKTAATFARRLLELGPKPEVAQQTRKILSACEKNPTDAYQLNYDMHNPFDICAASYRPIYRGKPVEKCPLSGACYSPEFKGQICRVTTVTEIGKDVIGLRISPLQFR

SEQ ID NO: 22 - protein, 1464 aa, Homo sapiens
MFSFVDLRLLLLLAATALLTHGQEEGQVEGQDEDIPPITCVQNGLRYHDRDVWKPEPCRICVCDNGKVLCDDVICDETKNCPGAEVPEGECCPVCPDGSESPTDQETTGVEGPKGDTGPRGPRGPAGPPGRDGIPGQPGLPGPPGPPGPPGPPGLGGNFAPQLSYGYDEKSTGGISVPGPMGPSGPRGLPGPPGAPGPQGFQGPPGEPGEPGASGPMGPRGPPGPPGKNGDDGEAGKPGRPGERGPPGPQGARGLPGTAGLPGMKGHRGFSGLDGAKGDAGPAGPKGEPGSPGENGAPGQMGPRGLPGERGRPGAPGPAGARGNDGATGAAGPPGPTGPAGPPGFPGAVGAKGEAGPQGPRGSEGPQGVRGEPGPPGPAGAAGPAGNPGADGQPGAKGANGAPGIAGAPGFPGARGPSGPQGPGGPPGPKGNSGEPGAPGSKGDTGAKGEPGPVGVQGPPGPAGEEGKRGARGEPGPTGLPGPPGERGGPGSRGFPGADGVAGPKGPAGERGSPGPAGPKGSPGEAGRPGEAGLPGAKGLTGSPGSPGPDGKTGPPGPAGQDGRPGPPGPPGARGQAGVMGFPGPKGAAGEPGKAGERGVPGPPGAVGPAGKDGEAGAQGPPGPAGPAGERGEQGPAGSPGFQGLPGPAGPPGEAGKPGEQGVPGDLGAPGPSGARGERGFPGERGVQGPPGPAGPRGANGAPGNDGAKGDAGAPGAPGSQGAPGLQGMPGERGAAGLPGPKGDRGDAGPKGADGSPGKDGVRGLTGPIGPPGPAGAPGDKGESGPSGPAGPTGARGAPGDRGEPGPPGPAGFAGPPGADGQPGAKGEPGDAGAKGDAGPPGPAGPAGPPGPIGNVGAPGAKGARGSAGPPGATGFPGAAGRVGPPGPSGNAGPPGPPGPAGKEGGKGPRGETGPAGRPGEVGPPGPPGPAGEKGSPGADGPAGAPGTPGPQGIAGQRGVVGLPGQRGERGFPGLPGPSGEPGKQGPSGASGERGPPGPMGPPGLAGPPGESGREGAPGAEGSPGRDGSPGAKGDRGETGPAGPPGAPGAPGAPGPVGPAGKSGDRGETGPAGPTGPVGPVGARGPAGPQGPRGDKGETGEQGDRGIKGHRGFSGLQGPPGPPGSPGEQGPSGASGPAGPRGPPGSAGAPGKDGLNGLPGPIGPPGPRGRTGDAGPVGPPGPPGPPGPPGPPSAGFDFSFLPQPPQEKAHDGGRYYRADDANVVRDRDLEVDTTLKSLSQQIENIRSPEGSRKNPARTCRDLKMCHSDWKSGEYWIDPNQGCNLDAIKVFCNMETGETCVYPTQPSVAQKNWYISKNPKDKRHVWFGESMTDGFQFEYGGQGSDPADVAIQLTFLRLMSTEASQNITYHCKNSVAYMDQQTGNLKKALLLQGSNEIEIRAEGNSRFTYSVTVDGCTSHTGAWGKTVIEYKTTKTSRLPIIDVAPLDVGAPDQEFGFDVGPVCFL

SEQ ID NO: 23 - protein, 1366 aa, Homo sapiens
MLSFVDTRTLLLLAVTLCLATCQSLQEETVRKGPAGDRGPRGERGPPGPPGRDGEDGPTGPPGPPGPPGPPGLGGNFAAQYDGKGVGLGPGPMGLMGPRGPPGAAGAPGPQGFQGPAGEPGEPGQTGPAGARGPAGPPGKAGEDGHPGKPGRPGERGVVGPQGARGFPGTPGLPGFKGIRGHNGLDGLKGQPGAPGVKGEPGAPGENGTPGQTGARGLPGERGRVGAPGPAGARGSDGSVGPVGPAGPIGSAGPPGFPGAPGPKGEIGAVGNAGPAGPAGPRGEVGLPGLSGPVGPPGNPGANGLTGAKGAAGLPGVAGAPGLPGPRGIPGPVGAAGATGARGLVGEPGPAGSKGESGNKGEPGSAGPQGPPGPSGEEGKRGPNGEAGSAGPPGPPGLRGSPGSRGLPGADGRAGVMGPPGSRGASGPAGVRGPNGDAGRPGEPGLMGPRGLPGSPGNIGPAGKEGPVGLPGIDGRPGPIGPAGARGEPGNIGFPGPKGPTGDPGKNGDKGHAGLAGARGAPGPDGNNGAQGPPGPQGVQGGKGEQGPPGPPGFQGLPGPSGPAGEVGKPGERGLHGEFGLPGPAGPRGERGPPGESGAAGPTGPIGSRGPSGPPGPDGNKGEPGVVGAVGTAGPSGPSGLPGERGAAGIPGGKGEKGEPGLRGEIGNPGRDGARGAPGAVGAPGPAGATGDRGEAGAAGPAGPAGPRGSPGERGEVGPAGPNGFAGPAGAAGQPGAKGERGAKGPKGENGVVGPTGPVGAAGPAGPNGPPGPAGSRGDGGPPGMTGFPGAAGRTGPPGPSGISGPPGPPGPAGKEGLRGPRGDQGPVGRTGEVGAVGPPGFAGEKGPSGEAGTAGPPGTPGPQGLLGAPGILGLPGSRGERGLPGVAGAVGEPGPLGIAGPPGARGPPGAVGSPGVNGAPGEAGRDGNPGNDGPPGRDGQPGHKGERGYPGNIGPVGAAGAPGPHGPVGPAGKHGNRGETGPSGPVGPAGAVGPRGPSGPQGIRGDKGEPGEKGPRGLPGLKGHNGLQGLPGIAGHHGDQGAPGSVGPAGPRGPAGPSGPAGKDGRTGHPGTVGPAGIRGPQGHQGPAGPPGPPGPPGPPGVSGGGYDFGYDGDFYRADQPRSAPSLRPKDYEVDATLKSLNNQIETLLTPEGSRKNPARTCRDLRLSHPEWSSGYYWIDPNQGCTMDAIKVYCDFSTGETCIRAQPENIPAKNWYRSSKDKKHVWLGETINAGSQFEYNVEGVTSKEMATQLAFMRLLANYASQNITYHCKNSIAYMDEETGNLKKAVILQGSNDVELVAEGNSRFTYTVLVDGCSKKTNEWGKTIIEYKTNKPSRLPFLDIAPLDIGGADQEFFVDIGPVCFK

SEQ ID NO: 24 - protein, 1019 aa, Homo sapiens
MLQGTCSVLLLWGILGAIQAQQQEVISPDTTERNNNCPEKTDCPIHVYFVLDTSESVTMQSPTDILLFHMKQFVPQFISQLQNEFYLDQVALSWRYGGLHFSDQVEVFSPPGSDRASFIKNLQGISSFRRGTFTDCALANMTEQIRQDRSKGTVHFAVVITDGHVTGSPCGGIKLQAERAREEGIRLFAVAPNQNLKEQGLRDIASTPHELYRNDYATMLPDSTEIDQDTINRIIKVMKHEAYGECYKVSCLEIPGPSGPKGYRGQKGAKGNMGEPGEPGQKGRQGDPGIEGPIGFPGPKGVPGFKGEKGEFGADGRKGAPGLAGKNGTDGQKGKLGRIGPPGCKGDPGNRGPDGYPGEAGSPGERGDQGGKGDPGRPGRRGPPGEIGAKGSKGYQGNSGAPGSPGVKGAKGGPGPRGPKGEPGRRGDPGTKGSPGSDGPKGEKGDPGPEGPRGLAGEVGNKGAKGDRGLPGPRGPQGALGEPGKQGSRGDPGDAGPRGDSGQPGPKGDPGRPGFSYPGPRGAPGEKGEPGPRGPEGGRGDFGLKGEPGRKGEKGEPADPGPPGEPGPRGPRGVPGPEGEPGPPGDPGLTECDVMTYVRETCGCCDCEKRCGALDVVFVIDSSESIGYTNFTLEKNFVINVVNRLGAIAKDPKSETGTRVGVVQYSHEGTFEAIQLDDERIDSLSSFKEAVKNLEWIAGGTWTPSALKFAYDRLIKESRRQKTRVFAVVITDGRHDPRDDDLNLRALCDRDVTVTAIGIGDMFHEKHESENLYSIACDKPQQVRNMTLFSDLVAEKFIDDMEDVLCPDPQIVCPDLPCQTELSVAQCTQRPVDIVFLLDGSERLGEQNFHKARRFVEQVARRLTLARRDDDPLNARVALLQFGGPGEQQVAFPLSHNLTAIHEALETTQYLNSFSHVGAGVVHAINAIVRSPRGGARRHAELSFVFLTDGVTGNDSLHESAHSMRKQNVVPTVLALGSDVDMDVLTTLSLGDRAAVFHEKDYDSLAQPGFFDRFIRWIC

SEQ ID NO: 25 - protein, 2263 aa, Homo sapiens
MMLLILFLVIICSHISVNQDSGPEYADVVFLVDSSDRLGSKSFPFVKMFITKMISSLPIEADKYRVALAQYSDKLHSEFHLSTFKGRSPMLNHLRKNFGFIGGSLQIGKALQEAHRTYFSAPANGRDKKQFPPILVVLASSESEDNVEEASKALRKDGVKIISVGVQKASEENLKAMATSQFHFNLRTVRDLSMFSQNMTHIIKDVIKYKEGAVDDIFVEACQGPSMADVVFLLDMSINGSEENFDYLKGFLEESVSALDIKENCMRVGLVAYSNETKVINSLSMGINKSEVLQHIQNLSPRTGKAYTGAAIKKLRKEVFSARNGSRKNQGVPQIAVLVTHRDSEDNVTKAAVNLRREGVTIFTLGIEGASDTQLEKIASHPAEQYVSKLKTFADLAAHNQTFLKKLRNQITHTVSVFSERTETLKSGCVDTEEADIYLLIDGSGSTQATDFHEMKTFLSEVVGMFNIAPHKVRVGAVQYADSWDLEFEINKYSNKQDLGKAIENIRQMGGNTNTGAALNFTLSLLQKAKKQRGNKVPCHLVVLTNGMSKDSILEPANRLREEHIRVYAIGIKEANQTQLREIAGEEKRVYYVHDFDALKDIRNQVVQEICTEEACKEMKADIMFLVDSSGSIGPENFSKMKTFMKNLVSKSQIGPDRVQIGVVQFSDINKEEFQLNRFMSQSDISNAIDQMAHIGQTTLTGSALSFVSQYFSPTKGARPNIRKFLILITDGEAQDIVKEPAVVLRQEGVIIYSVGVFGSNVTQLEEISGRPEMVFYVENFDILQRIEDDLVFGICSPREECKRIEVLDVVFVIDSSGSIDYDEYNIMKDFMIGLVKKADVGKNQVRFGALKYADDPEVLFYLDDFGTKLEVISVLQNDQAMGGSTYTAEALGFSDHMFTEARGSRLNKGVPQVLIVITDGESHDADKLNATAKALRDKGILVLAVGIDGANPVELLAMAGSSDKYFFVETFGGLKGIFSDVTASVCNSSKVDCEIDKVDLVFLMDGSTSIQPNDFKKMKEFLASVVQDFDVSLNRVRIGAAQFSDTYHPEFPLGTFIGEKEISFQIENIKQIFGNTHIGAALREVEHYFRPDMGSRINTGTPQVLLVLTDGQSQDEVAQAAEALRHRGIDIYSVGIGDVDDQQLIQITGTAEKKLTVHNFDELKKVNKRIVRNICTTAGESNCFVDVVVGFDVSTQEKGQTLLEGQPWMETYLQDILRAISSLNGVSCEVGTETQVSVAFQVTNAMEKYSPKFEIYSENILNSLKDITVKGPSLLNANLLDSLWDTFQNKSAARGKVVLLFSDGLDDDVEKLEQKSDELRKEGLNALITVALDGPADSSDLADLPYIEFGKGFEYRTQLSIGMRELGSRLSKQLVNVAERTCCCLFCKCIGGDGTMGDPGPPGKRGPPGFKGSEGYLGEEGIAGERGAPGPVGEQGTKGCYGTKGPKGNRGLNGQEGEVGENGIDGLNGEQGDNGLPGRKGEKGDEGSQGSPGKRGTPGDRGAKGLRGDPGAPGVDSSIEGPTGLKGERGRQGRRGWPGPPGTPGSRRKTAAHGRRGHTGPQGTAGIPGPDGLEGSLGLKGPQGPRGEAGVKGEKGGVGSKGPQGPPGPGGEAGNQGRLGSQGNKGEPGDLGEKGAVGFPGPRGLQGNDGSPGYGSVGRKGAKGQEGFPGESGPKGEIGDPGGPGETGLKGARGKMISAGLPGEMGSPGEPGPPGRKGVKGAKGLASFSTCELIQYVRDRSPGRHGKPECPVHPTELVFALDHSRDVTEQEFERMKEMMAFLVRDIKVRENSCPVGAHIAILSYNSHARHLVRFSDAYKKSQLLREIETIPYERSSASREIGRAMRFISRNVFKRTLPGAHTRKIATFFSSGQSADAHSITTAAMEFGALEIIPVVITFSNVPSVRRAFAIDDTGTFQVIVVPSGADYIPALERLQRCTFCYDVCKPDASCDQARPPPVQSYMDAAFLLDASRNMGSAEFEDIRAFLGALLDHFEITPEPETSVTGDRVALLSHAPPDFLPNTQKSPVRAEFNLTTYRSKRLMKRHVHESVKQLNGDAFIGHALQWTLDNVFLSTPNLRRNKVIFVISAGETSHLDGEILKKESLRAKCQGYALFVFSLGPIWDDKELEDLASHPLDHHLVQLGRIHKPDHSYGVKFVKSFINSIRRAINKYPPINLKIKCNRLNSIDPKQPPRPFRSFVPGPLKATLKEDVLQKAKFFQDKKYLSRVARSGRDDAIQNFMRSTSHTFKNGRMIESAPKQHD

SEQ ID NO: 26 - protein, 3063 aa, Homo sapiens
MRSRLPPALAALGAALLLSSIEAEVDPPSDLNFKIIDENTVHMSWAKPVDPIVGYRITVDPTTDGPTKEFTLSASTTETLLSELVPETEYVVTITSYDEVEESVPVIGQLTIQTGSSTKPVEKKPGKTEIQKCSVSAWTDLVFLVDGSWSVGRNNFKYILDFIAALVSAFDIGEEKTRVGVVQYSSDTRTEFNLNQYYQRDELLAAIKKIPYKGGNTMTGDAIDYLVKNTFTESAGARVGFPKVAIIITDGKSQDEVEIPARELRNVGVEVFSLGIKAADAKELKQIASTPSLNHVFNVANFDAIVDIQNEIISQVCSGVDEQLGELVSGEEVVEPPSNLIAMEVSSKYVKLNWNPSPSPVTGYKVILTPMTAGSRQHALSVGPQTTTLSVRDLSADTEYQISVSAMKGMTSSEPISIMEKTQPMKVQVECSRGVDIKADIVFLVDGSYSIGIANFVKVRAFLEVLVKSFEISPNRVQISLVQYSRDPHTEFTLKKFTKVEDIIEAINTFPYRGGSTNTGKAMTYVREKIFVPSKGSRSNVPKVMILITDGKSSDAFRDPAIKLRNSDVEIFAVGVKDAVRSELEAIASPPAETHVFTVEDFDAFQRISFELTQSICLRIEQELAAIKKKAYVPPKDLSFSEVTSYGFKTNWSPAGENVFSYHITYKEAAGDDEVTVVEPASSTSVVLSSLKPETLYLVNVTAEYEDGFSIPLAGEETTEEVKGAPRNLKVTDETTDSFKITWTQAPGRVLRYRIIYRPVAGGESREVTTPPNQRRRTLENLIPDTKYEVSVIPEYFSGPGTPLTGNAATEEVRGNPRDLRVSDPTTSTMKLSWSGAPGKVKQYLVTYTPVAGGETQEVTVRGDTTNTVLQGLKEGTQYALSVTALYASGAGDALFGEGTTLEERGSPQDLVTKDITDTSIGAYWTSAPGMVRGYRVSWKSLYDDVDTGEKNLPEDAIHTMIENLQPETKYRISVFATYSSGEGEPLTGDATTELSQDSKTLKVDEETENTMRVTWKPAPGKVVNYRVVYRPHGRGKQMVAKVPPTVTSTVLKRLQPQTTYDITVLPIYKMGEGKLRQGSGTTASRFKSPRNLKTSDPTMSSFRVTWEPAPGEVKGYKVTFHPTGDDRRLGELVVGPYDNTVVLEELRAGTTYKVNVFGMFDGGESSPLVGQEMTTLSDTTVMPILSSGMECLTRAEADIVLLVDGSWSIGRANFRTVRSFISRIVEVFDIGPKRVQIALAQYSGDPRTEWQLNAHRDKKSLLQAVANLPYKGGNTLTGMALNFIRQQNFRTQAGMRPRARKIGVLITDGKSQDDVEAPSKKLKDEGVELFAIGIKNADEVELKMIATDPDDTHAYNVADFESLSRIVDDLTINLCNSVKGPGDLEAPSNLVISERTHRSFRVSWTPPSDSVDRYKVEYYPVSGGKRQEFYVSRMETSTVLKDLKPETEYVVNVYSVVEDEYSEPLKGTEKTLPVPVVSLNIYDVGPTTMHVQWQPVGGATGYILSYKPVKDTEPTRPKEVRLGPTVNDMQLTDLVPNTEYAVTVQAVLHDLTSEPVTVREVTLPLPRPQDLKLRDVTHSTMNVFWEPVPGKVRKYIVRYKTPEEDVKEVEVDRSETSTSLKDLFSQTLYTVSVSAVHDEGESPPVTAQETTRPVPAPTNLKITEVTSEGFRGTWDHGASDVSLYRITWAPFGSSDKMETILNGDENTLVFENLNPNTIYEVSITAIYPDESESDDLIGSERTLPILTTQAPKSGPRNLQVYNATSNSLTVKWDPASGRVQKYRITYQPSTGEGNEQTTTIGGRQNSVVLQKLKPDTPYTITVSSLYPDGEGGRMTGRGKTKPLNTVRNLRVYDPSTSTLNVRWDHAEGNPRQYKLFYAPAAGGPEELVPIPGNTNYAILRNLQPDTSYTVTVVPVYTEGDGGRTSDTGRTLMRGLARNVQVYNPTPNSLDVRWDPAPGPVLQYRVVYSPVDGTRPSESIVVPGNTRMVHLERLIPDTLYSVNLVALYSDGEGNPSPAQGRTLPRSGPRNLRVFGETTNSLSVAWDHADGPVQQYRIIYSPTVGDPIDEYTTVPGRRNNVILQPLQPDTPYKITVIAVYEDGDGGHLTGNGRTVGLLPPQNIHISDEWYTRFRVSWDPSPSPVLGYKIVYKPVGSNEPMEAFVGEMTSYTLHNLNPSTTYDVNVYAQYDSGLSVPLTDQGTTLYLNVTDLKTYQIGWDTFCVKWSPHRAATSYRLKLSPADGTRGQEITVRGSETSHCFTGLSPDTDYGVTVFVQTPNLEGPGVSVKEHTTVKPTEAPTEPPTPPPPPTIPPARDVCKGAKADIVFLTDASWSIGDDNFNKVVKFIFNTVGGFDEISPAGIQVSFVQYSDEVKSEFKLNTYNDKALALGALQNIRYRGGNTRTGKALTFIKEKVLTWESGMRKNVPKVLVVVTDGRSQDEVKKAALVIQQSGFSVFVVGVADVDYNELANIASKPSERHVFIVDDFESFEKIEDNLITFVCETATSSCPLIYLDGYTSPGFKMLEAYNLTEKNFASVQGVSLESGSFPSYSAYRIQKNAFVNQPTADLHPNGLPPSYTIILLFRLLPETPSDPFAIWQITDRDYKPQVGVIADPSSKTLSFFNKDTRGEVQTVTFDTEEVKTLFYGSFHKVHIVVTSKSVKIYIDCYEIIEKDIKEAGNITTDGYEILGKLLKGERKSAAFQIQSFDIVCSPVWTSRDRCCDIPSRRDEGKCPAFPNSCTCTQDSVGPPGPPGPAGGPGAKGPRGERGISGAIGPPGPRGDIGPPGPQGPPGPQGPNGLSIPGEQGRQGMKGDAGEPGLPGRTGTPGLPGPPGPMGPPGDRGFTGKDGAMGPRGPPGPPGSPGSPGVTGPSGKPGKPGDHGRPGPSGLKGEKGDRGDIASQNMMRAVARQVCEQLISGQMNRFNQMLNQIPNDYQSSRNQPGPPGPPGPPGSAGARGEPGPGGRPGFPGTPGMQGPPGERGLPGEKGERGTGSSGPRGLPGPPGPQGESRTGPPGSTGSRGPPGPPGRPGNSGIRGPPGPPGYCDSSQCASIPYNGQGYPGSG

SEQ ID NO: 27 - protein, 1604 aa, Homo sapiens
MWVSWAPGLWLLGLWATFGHGANTGAQCPPSQQEGLKLEHSSSLPANVTGFNLIHRLSLMKTSAIKKIRNPKGPLILRLGAAPVTQPTRRVFPRGLPEEFALVLTLLLKKHTHQKTWYLFQVTDANGYPQISLEVNSQERSLELRAQGQDGDFVSCIFPVPQLFDLRWHKLMLSVAGRVASVHVDCSSASSQPLGPRRPMRPVGHVFLGLDAEQGKPVSFDLQQVHIYCDPELVLEEGCCEILPAGCPPETSKARRDTQSNELIEINPQSEGKVYTRCFCLEEPQNSEVDAQLTGRISQKAERGAKVHQETAADECPPCVHGARDSNVTLAPSGPKGGKGERGLPGPPGSKGEKGARGNDCVRISPDAPLQCAEGPKGEKGESGALGPSGLPGSTGEKGQKGEKGDGGIKGVPGKPGRDGRPGEICVIGPKGQKGDPGFVGPEGLAGEPGPPGLPGPPGIGLPGTPGDPGGPPGPKGDKGSSGIPGKEGPGGKPGKPGVKGEKGDPCEVCPTLPEGFQNFVGLPGKPGPKGEPGDPVPARGDPGIQGIKGEKGEPCLSCSSVVGAQHLVSSTGASGDVGSPGFGLPGLPGRAGVPGLKGEKGNFGEAGPAGSPGPPGPVGPAGIKGAKGEPCEPCPALSNLQDGDVRVVALPGPSGEKGEPGPPGFGLPGKQGKAGERGLKGQKGDAGNPGDPGTPGTTGRPGLSGEPGVQGPAGPKGEKGDGCTACPSLQGTVTDMAGRPGQPGPKGEQGPEGVGRPGKPGQPGLPGVQGPPGLKGVQGEPGPPGRGVQGPQGEPGAPGLPGIQGLPGPRGPPGPTGEKGAQGSPGVKGATGPVGPPGASVSGPPGRDGQQGQTGLRGTPGEKGPRGEKGEPGECSCPSQGDLIFSGMPGAPGLWMGSSWQPGPQGPPGIPGPPGPPGVPGLQGVPGNNGLPGQPGLTAELGSLPIEQHLLKSICGDCVQGQRAHPGYLVEKGEKGDQGIPGVPGLDNCAQCFLSLERPRAEEARGDNSEGDPGCVGSPGLPGPPGLPGQRGEEGPPGMRGSPGPPGPIGPPGFPGAVGSPGLPGLQGERGLTGLTGDKGEPGPPGQPGYPGATGPPGLPGIKGERGYTGSAGEKGEPGPPGSEGLPGPPGPAGPRGERGPQGNSGEKGDQGFQGQPGFPGPPGPPGFPGKVGSPGPPGPQAEKGSEGIRGPSGLPGSPGPPGPPGIQGPAGLDGLDGKDGKPGLRGDPGPAGPPGLMGPPGFKGKTGHPGLPGPKGDCGKPGPPGSTGRPGAEGEPGAMGPQGRPGPPGHVGPPGPPGQPGPAGISAVGLKGDRGATGERGLAGLPGQPGPPGHPGPPGEPGTDGAAGKEGPPGKQGFYGPPGPKGDPGAAGQKGQAGEKGRAGMPGGPGKSGSMGPVGPPGPAGERGHPGAPGPSGSPGLPGVPGSMGDMVNYDEIKRFIRQEIIKMFDERMAYYTSRMQFPMEMAAAPGRPGPPGKDGAPGRPGAPGSPGLPGQIGREGRQGLPGVRGLPGTKGEKGDIGIGIAGENGLPGPPGPQGPPGYGKMGATGPMGQQGIPGIPGPPGPMGQPGKAGHCNPSDCFGAMPMEQQYPPMKTMKGPFG

SEQ ID NO: 28 - protein, 540 aa, Homo sapiens
MGPGERAGGGGDAGKGNAAGGGGGGRSATTAGSRAVSALCLLLSVGSAAACLLLGVQAAALQGRVAALEEERELLRRAGPPGALDAWAEPHLERLLREKLDGLAKIRTAREAPSECVCPPGPPGRRGKPGRRGDPGPPGQSGRDGYPGPLGLDGKPGLPGPKGEKGAPGDFGPRGDQGQDGAAGPPGPPGPPGARGPPGDTGKDGPRGAQGPAGPKGEPGQDGEMGPKGPPGPKGEPGVPGKKGDDGTPSQPGPPGPKGEPGSMGPRGENGVDGAPGPKGEPGHRGTDGAAGPRGAPGLKGEQGDTVVIDYDGRILDALKGPPGPQGPPGPPGIPGAKGELGLPGAPGIDGEKGPKGQKGDPGEPGPAGLKGEAGEMGLSGLPGADGLKGEKGESASDSLQESLAQLIVEPGPPGPPGPPGPMGLQGIQGPKGLDGAKGEKGASGERGPSGLPGPVGPPGLIGLPGTKGEKGRPGEPGLDGFPGPRGEKGDRSERGEKGERGVPGRKGVKGQKGEPGPPGLDQPCPVGPDGLPVPGCWHK

SEQ ID NO: 29 - protein, 662 aa, Homo sapiens
MSHVAVENALGLDQQFAGLDLNSSDNQSGGSTASKGRYIPPHLRNREATKGFYDKDSSGWSSSKDKDAYSSFGSRSDSRGKSSFFSDRGSGSRGRFDDRGRSDYDGIGSRGDRSGFGKFERGGNSRWCDKSDEDDWSKPLPPSERLEQELFSGGNTGINFEKYDDIPVEATGNNCPPHIESFSDVEMGEIIMGNIELTRYTRPTPVQKHAIPIIKEKRDLMACAQTGSGKTAAFLLPILSQIYSDGPGEALRAMKENGRYGRRKQYPISLVLAPTRELAVQIYEEARKFSYRSRVRPCVVYGGADIGQQIRDLERGCHLLVATPGRLVDMMERGKIGLDFCKYLVLDEADRMLDMGFEPQIRRIVEQDTMPPKGVRHTMMFSATFPKEIQMLARDFLDEYIFLAVGRVGSTSENITQKVVWVEESDKRSFLLDLLNATGKDSLTLVFVETKKGADSLEDFLYHEGYACTSIHGDRSQRDREEALHQFRSGKSPILVATAVAARGLDISNVKHVINFDLPSDIEEYVHRIGRTGRVGNLGLATSFFNERNINITKDLLDLLVEAKQEVPSWLENMAYEHHYKGSSRGRSKSSRFSGGFGARDYRQSSGASSSSFSSSRASSSRSGGGGHGSSRGFGGGGYGGFYNSDGYGGNYNSQGVDWWGN

SEQ ID NO: 30 - protein, 919 aa, Homo sapiens
MASATAAAARRGLGRALPLFWRGYQTERGVYGYRPRKPESREPQGALERPPVDHGLARLVTVYCEHGHKAAKINPLFTGQALLENVPEIQALVQTLQGPFHTAGLLNMGKEEASLEEVLVYLNQIYCGQISIETSQLQSQDEKDWFAKRFEELQKETFTTEERKHLSKLMLESQEFDHFLATKFSTVKRYGGEGAESMMGFFHELLKMSAYSGITDVIIGMPHRGRLNLLTGLLQFPPELMFRKMRGLSEFPENFSATGDVLSHLTSSVDLYFGAHHPLHVTMLPNPSHLEAVNPVAVGKTRGRQQSRQDGDYSPDNSAQPGDRVICLQVHGDASFCGQGIVPETFTLSNLPHFRIGGSVHLIVNNQLGYTTPAERGRSSLYCSDIGKLVGCAIIHVNGDSPEEVVRATRLAFEYQRQFRKDVIIDLLCYRQWGHNELDEPFYTNPIMYKIIRARKSIPDTYAEHLIAGGLMTQEEVSEIKSSYYAKLNDHLNNMAHYRPPALNLQAHWQGLAQPEAQITTWSTGVPLDLLRFVGMKSVEVPRELQMHSHLLKTHVQSRMEKMMDGIKLDWATAEALALGSLLAQGFNVRLSGQDVGRGTFSQRHAIVVCQETDDTYIPLNHMDPNQKGFLEVSNSPLSEEAVLGFEYGMSIESPKLLPLWEAQFGDFFNGAQIIFDTFISGGEAKWLLQSGIVILLPHGYDGAGPDHSSCRIERFLQMCDSAEEGVDGDTVNMFVVHPTTPAQYFHLLRRQMVRNFRKPLIVASPKMLLRLPAAVSTLQEMAPGTTFNPVIGDSSVDPKKVKTLVFCSGKHFYSLVKQRESLGAKKHDFAIIRVEELCPFPLDSLQQEMSKYKHVKDHIWSQEEPQNMGPWSFVSPRFEKQLACKLRLVGRPPLPVPAVGIGTVHLHQHEDILAKTFA

SEQ ID NO: 31 - protein, 2871 aa, Homo sapiens
MSCNGGSHPRINTLGRMIRAESGPDLRYEVTSGGGGTSRMYYSRRGVITDQNSDGYCQTGTMSRHQNQNTIQELLQNCSDCLMRAELIVQPELKYGDGIQLTRSRELDECFAQANDQMEILDSLIREMRQMGQPCDAYQKRLLQLQEQMRALYKAISVPRVRRASSKGGGGYTCQSGSGWDEFTKHVTSECLGWMRQQRAEMDMVAWGVDLASVEQHINSHRGIHNSIGDYRWQLDKIKADLREKSAIYQLEEEYENLLKASFERMDHLRQLQNIIQATSREIMWINDCEEEELLYDWSDKNTNIAQKQEAFSIRMSQLEVKEKELNKLKQESDQLVLNQHPASDKIEAYMDTLQTQWSWILQITKCIDVHLKENAAYFQFFEEAQSTEAYLKGLQDSIRKKYPCDKNMPLQHLLEQIKELEKEREKILEYKRQVQNLVNKSKKIVQLKPRNPDYRSNKPIILRALCDYKQDQKIVHKGDECILKDNNERSKWYVTGPGGVDMLVPSVGLIIPPPNPLAVDLSCKIEQYYEAILALWNQLYINMKSLVSWHYCMIDIEKIRAMTIAKLKTMRQEDYMKTIADLELHYQEFIRNSQGSEMFGDDDKRKIQSQFTDAQKHYQTLVIQLPGYPQHQTVTTTEITHHGTCQDVNHNKVIETNRENDKQETWMLMELQKIRRQIEHCEGRMTLKNLPLADQGSSHHITVKINELKSVQNDSQAIAEVLNQLKDMLANFRGSEKYCYLQNEVFGLFQKLENINGVTDGYLNSLCTVRALLQAILQTEDMLKVYEARLTEEETVCLDLDKVEAYRCGLKKIKNDLNLKKSLLATMKTELQKAQQIHSQTSQQYPLYDLDLGKFGEKVTQLTDRWQRIDKQIDFRLWDLEKQIKQLRNYRDNYQAFCKWLYDAKRRQDSLESMKFGDSNTVMRFLNEQKNLHSEISGKRDKSEEVQKIAELCANSIKDYELQLASYTSGLETLLNIPIKRTMIQSPSGVILQEAADVHARYIELLTRSGDYYRFLSEMLKSLEDLKLKNTKIEVLEEELRLARDANSENCNKNKFLDQNLQKYQAECSQFKAKLASLEELKRQAELDGKSAKQNLDKCYGQIKELNEKITRLTYEIEDEKRRRKSVEDRFDQQKNDYDQLQKARQCEKENLGWQKLESEKAIKEKEYEIERLRVLLQEEGTRKREYENELAKVRNHYNEEMSNLRNKYETEINITKTTIKEISMQKEDDSKNLRNQLDRLSRENRDLKDEIVRLNDSILQATEQRRRAEENALQQKACGSEIMQKKQHLEIELKQVMQQRSEDNARHKQSLEEAAKTIQDKNKEIERLKAEFQEEAKRRWEYENELSKVRNNYDEEIISLKNQFETEINITKTTIHQLTMQKEEDTSGYRAQIDNLTRENRSLSEEIKRLKNTLTQTTENLRRVEEDIQQQKATGSEVSQRKQQLEVELRQVTQMRTEESVRYKQSLDDAAKTIQDKNKEIERLKQLIDKETNDRKCLEDENARLQRVQYDLQKANSSATETINKLKVQEQELTRLRIDYERVSQERTVKDQDITRFQNSLKELQLQKQKVEEELNRLKRTASEDSCKRKKLEEELEGMRRSLKEQAIKITNLTQQLEQASIVKKRSEDDLRQQRDVLDGHLREKQRTQEELRRLSSEVEALRRQLLQEQESVKQAHLRNEHFQKAIEDKSRSLNESKIEIERLQSLTENLTKEHLMLEEELRNLRLEYDDLRRGRSEADSDKNATILELRSQLQISNNRTLELQGLINDLQRERENLRQEIEKFQKQALEASNRIQESKNQCTQVVQERESLLVKIKVLEQDKARLQRLEDELNRAKSTLEAETRVKQRLECEKQQIQNDLNQWKTQYSRKEEAIRKIESEREKSEREKNSLRSEIERLQAEIKRIEERCRRKLEDSTRETQSQLETERSRYQREIDKLRQRPYGSHRETQTECEWTVDTSKLVFDGLRKKVTAMQLYECQLIDKTTLDKLLKGKKSVEEVASEIQPFLRGAGSIAGASASPKEKYSLVEAKRKKLISPESTVMLLEAQAATGGIIDPHRNEKLTVDSAIARDLIDFDDRQQIYAAEKAITGFDDPFSGKTVSVSEAIKKNLIDRETGMRLLEAQIASGGVVDPVNSVFLPKDVALARGLIDRDLYRSLNDPRDSQKNFVDPVTKKKVSYVQLKERCRIEPHTGLLLLSVQKRSMSFQGIRQPVTVTELVDSGILRPSTVNELESGQISYDEVGERIKDFLQGSSCIAGIYNETTKQKLGIYEAMKIGLVRPGTALELLEAQAATGFIVDPVSNLRLPVEEAYKRGLVGIEFKEKLLSAERAVTGYNDPETGNIISLFQAMNKELIEKGHGIRLLEAQIATGGIIDPKESHRLPVDIAYKRGYFNEELSEILSDPSDDTKGFFDPNTEENLTYLQLKERCIKDEETGLCLLPLKEKKKQVQTSQKNTLRKRRVVIVDPETNKEMSVQEAYKKGLIDYETFKELCEQECEWEEITITGSDGSTRVVLVDRKTGSQYDIQDAIDKGLVDRKFFDQYRSGSLSLTQFADMISLKNGVGTSSSMGSGVSDDVFSSSRHESVSKISTISSVRNLTIRSSSFSDTLEESSPIAAIFDTENLEKISITEGIERGIVDSITGQRLLEAQACTGGIIHPTTGQKLSLQDAVSQGVIDQDMATRLKPAQKAFIGFEGVKGKKKMSAAEAVKEKWLPYEAGQRFLEFQYLTGGLVDPEVHGRISTEEAIRKGFIDGRAAQRLQDTSSYAKILTCPKTKLKISYKDAINRSMVEDITGLRLLEAASVSSKGLPSPYNMSSAPGSRSGSRSGSRSGSRSGSRSGSRRGSFDATGNSSYSYSYSFSSSSIGH

SEQ ID NO: 32 - protein, 165 aa, Homo sapiens
MASGVQVADEVCRIFYDMKVRKCSTPEEIKKRKKAVIFCLSADKKCIIVEEGKEILVGDVGVTITDPFKHFVGMLPEKDCRYALYDASFETKESRKEELMFFLWAPELAPLKSKMIYASSKDAIKKKFQGIKHECQANGPEDLNRACIAEKLGGSLIVAFEGCPV

SEQ ID NO: 33 - protein, 430 aa, Homo sapiens
MAANLSRNGPALQEAYVRVVTEKSPTDWALFTYEGNSNDIRVAGTGEGGLEEMVEELNSGKVMYAFCRVKDPNSGLPKFVLINWTGEGVNDVRKGACASHVSTMASFLKGAHVTINARAEEDVEPECIMEKVAKASGANYSFHKESGRFQDVGPQAPVGSVYQKTNAVSEIKRVGKDSFWAKAEKEEENRRLEEKRRAEEAQRQLEQERRERELREAARREQRYQEQGGEASPQRTWEQQQEVVSRNRNEQESAVHPREIFKQKERAMSTTSISSPQPGKLRSPFLQKQLTQPETHFGREPAAAISRPRADLPAEEPAPSTPPCLVQAEEEAVYEEPPEQETFYEQPPLVQQQGAGSEHIDHHIQGQGLSGQGLCARALYDYQAADDTEISFDPENLITGIEVIDEGWWRGYGPDGHFGMFPANYVELIE

SEQ ID NO: 34 - protein, 225 aa, Homo sapiens
MGFGDLKSPAGLQVLNDYLADKSYIEGYVPSQADVAVFEAVSSPPPADLCHALRWYNHIKSYEKEKASLPGVKKALGKYGPADVEDTTGSGATDSKDDDDIDLFGSDDEEESEEAKRLREERLAQYESKKAKKPALVAKSSILLDVKPWDDETDMAKLEECVRSIQADGLVWGSSKLVPVGYGIKKLQIQCVVEDDKVGTDMLEEQITAFEDYVQSMDVAAFNKI

SEQ ID NO: 35 - protein, 372 aa, Homo sapiens
MNAVISASASFFLDKMATPAVPVSAPPATPTPVPAAAPASVPAPTPAPAAAPVPAAAPASSSDPAAAAAATAAPGQTPASAQAPAQTPAPALPGPALPGPFPGGRVVRLHPVILASIVDSYERRNEGAARVIGTLLGTVDKHSVEVTNCFSVPHNESEDEVAVDMEFAKNMYELHKKVSPNELILGWYATGHDITEHSVLIHEYYSREAPNPIHLTVDTSLQNGRMSIKAYVSTLMGVPGRTMGVMFTPLTVKYAYYDTERIGVDLIMKTCFSPNRVIGLSSDLQQVGGASARIQDALSTVLQYAEDVLSGKVSADNTVGRFLMSLVNQVPKIVPDDFETMLNSNINDLLMVTYLANLTQSQIALNEKLVNL

SEQ ID NO: 36 - protein, 324 aa, Homo sapiens
MGNLLKVLTCTDLEQGPNFFLDFENAQPTESEKEIYNQVNVVLKDAEGILEDLQSYRGAGHEIREAIQHPADEKLQEKAWGAVVPLVGKLKKFYEFSQRLEAALRGLLGALTSTPYSPTQHLEREQALAKQFAEILHFTLRFDELKMTNPAIQNDFSYYRRTLSRMRINNVPAEGENEVNNELANRMSLFYAEATPMLKTLSDATTKFVSENKNLPIENTTDCLSTMASVCRVMLETPEYRSRFTNEETVSFCLRVMVGVIILYDHVHPVGAFAKTSKIDMKGCIKVLKDQPPNSVEGLLNALRYTTKHLNDETTSKQIKSMLQ

SEQ ID NO: 37 - protein, 510 aa, Homo sapiens
MYRALRLLARSRPLVRAPAAALASAPGLGGAAVPSFWPPNAARMASQNSFRIEYDTFGELKVPNDKYYGAQTVRSTMNFKIGGVTERMPTPVIKAFGILKRAAAEVNQDYGLDPKIANAIMKAADEVAEGKLNDHFPLVVWQTGSGTQTNMNVNEVISNRAIEMLGGELGSKIPVHPNDHVNKSQSSNDTFPTAMHIAAAIEVHEVLLPGLQKLHDALDAKSKEFAQIIKIGRTHTQDAVPLTLGQEFSGYVQQVKYAMTRIKAAMPRIYELAAGGTAVGTGLNTRIGFAEKVAAKVAALTGLPFVTAPNKFEALAAHDALVELSGAMNTTACSLMKIANDIRFLGSGPRSGLGELILPENEPGSSIMPGKVNPTQCEAMTMVAAQVMGNHVAVTVGGSNGHFELNVFKPMMIKNVLHSARLLGDASVSFTENCVVGIQANTERINKLMNESLMLVTALNPHIGYDKAAKIAKTAHKNGSTLKETAIELGYLTAEQFDEWVKPKDMLGPK

SEQ ID NO: 38 - protein, 372 aa, Homo sapiens
MSGRSGKKKMSKLSRSARAGVIFPVGRLMRYLKKGTFKYRISVGAPVYMAAVIEYLAAEILELAGNAARDNKKARIAPRHILLAVANDEELNQLLKGVTIASGGVLPRIHPELLAKKRGTKGKSETILSPPPEKRGRKATSGKKGGKKSKAAKPRTSKKSKPKDSDKEGTSNSTSEDGPGDGFTILSSKSLVLGQKLSLTQSDISHIGSMRVEGIVHPTTAEIDLKEDIGKALEKAGGKEFLETVKELRKSQGPLEVAEAAVSQSSGLAAKFVIHCHIPQWGSDKCEEQLEETIKNCLSAAEDKKLKSVAFPPFPSGRNCFPKQTAAQVTLKAISAHFDDSSASSLKNVYFLLFDSESIGIYVQEMAKLDAK

SEQ ID NO: 39 - protein, 205 aa, Homo sapiens
MTERRVPFSLLRGPSWDPFRDWYPHSRLFDQAFGLPRLPEEWSQWLGGSSWPGYVRPLPPAAIESPAVAAPAYSRALSRQLSSGVSEIRHTADRWRVSLDVNHFAPDELTVKTKDGVVEITGKHEERQDEHGYISRCFTRKYTLPPGVDPTQVSSSLSPEGTLTVEAPMPKLATQSNEITIPVTFESRAQLGGPEAAKSDETAAK

SEQ ID NO: 40 - protein, 463 aa, Homo sapiens
METEQPEETFPNTETNGEFGKRPAEDMEEEQAFKRSRNTDEMVELRILLQSKNAGAVIGKGGKNIKALRTDYNASVSVPDSSGPERILSISADIETIGEILKKIIPTLEEGLQLPSPTATSQLPLESDAVECLNYQHYKGSDFDCELRLLIHQSLAGGIIGVKGAKIKELRENTQTTIKLFQECCPHSTDRVVLIGGKPDRVVECIKIILDLISESPIKGRAQPYDPNFYDETYDYGGFTMMFDDRRGRPVGFPMRGRGGFDRMPPGRGGRPMPPSRRDYDDMSPRRGPPPPPPGRGGRGGSRARNLPLPPPPPPRGGDLMAYDRRGRPGDRYDGMVGFSADETWDSAIDTWSPSEWQMAYEPQGGSGYDYSYAGGRGSYGDLGGPIITTQVTIPKDLAGSIIGKGGQRIKQIRHESGASIKIDEPLEGSEDRIITITGTQDQIQNAQYLLQNSVKQYSGKFF

SEQ ID NO: 41 - protein, 572 aa, Homo sapiens
QRQQPDEQRRRSGAMVKMAAAGGGGGGGRYYGGGSEGGRAPKRLKTDNAGDQHGGGGGGGGGAGAAGGGGGGENYDDPHKTPASPVVHIRGLIDGVVEADLVEALQEFGPISYVVVMPKKRQALVEFEDVLGACNAVNYAADNQIYIAGHPAFVNYSTSQKISRPGDSDDSRSVNSVLLFTILNPIYSITTDVLYTICNPCGPVQRIVIFRKNGVQAMVEFDSVQSAQRAKASLNGADIYSGCCTLKIEYAKPTRLNVFKNDQDTWDYTNPNLSGQGDPGSNPNKRQRQPPLLGDHPAEYGGPHGGYHSHYHDEGYGPPPPHYEGRRMGPPVGGHRRGPSRYGPQYGHPPPPPPPPEYGPHADSPVLMVYGLDQSKMNCDRVFNVFCLYGNVEKVKFMKSKPGAAMVEMADGYAVDRAITHLNNNFMFGQKLNVCVSKQPAIMPGQSYGLEDGSCSYKDFSESRNNRFSTPEQAAKNRIQHPSNVLHFFNAPLEVTEENFFEICDELGVKRPSSVKVFSGKSERSSSGLLEWESKSDALETLGFLNHYQMKNPNGPYPYTLKLCFSTAQHAS

SEQ ID NO: 42 - protein, 730 aa, Homo sapiens
MAAGVEAAAEVAATEIKMEEESGAPGVPSGNGAPGPKGEGERPAQNEKRKEKNIKRGGNRFEPYANPTKRYRAFITNIPFDVKWQSLKDLVKEKVGEVTYVELLMDAEGKSRGCAVVEFKMEESMKKAAEVLNKHSLSGRPLKVKEDPDGEHARRAMQKVMATTGGMGMGPGGPGMITIPPSILNNPNIPNEIIHALQAGRLGSTVFVANLDYKVGWKKLKEVFSMAGVVVRADILEDKDGKSRGIGTVTFEQSIEAVQAISMFNGQLLFDRPMHVKMDERALPKGDFFPPERPQQLPHGLGGIGMGLGPGGQPIDANHLNKGIGMGNIGPAGMGMEGIGFGINKMGGMEGPFGGGMENMGRFGSGMNMGRINEILSNALKRGEIIAKQGGGGGGGSVPGIERMGPGIDRLGGAGMERMGAGLGHGMDRVGSEIERMGLVMDRMGSVERMGSGIERMGPLGLDHMASSIERMGQTMERIGSGVERMGAGMGFGLERMAAPIDRVGQTIERMGSGVERMGPAIERMGLSMERMVPAGMGAGLERMGPVMDRMATGLERMGANNLERMGLERMGANSLERMGLERMGANSLERMGPAMGPALGAGIERMGLAMGGGGGASFDRAIEMERGNFGGSFAGSFGGAGGHAPGVARKACQIFVRNLPFDFTWKMLKDKFNECGHVLYADIKMENGKSKGCGVVKFESPEVAERACRMMNGMKLSGREIDVRIDRNA

SEQ ID NO: 43 - protein, 633 aa, Homo sapiens
MANQVNGNAVQLKEEEEPMDTSSVTHTEHYKTLIEAGLPQKVAERLDEIFQTGLVAYVDLDERAIDALREFNEEGALSVLQQFKESDLSHVQNKSAFLCGVMKTYRQREKQGSKVQESTKGPDEAKIKALLERTGYTLDVTTGQRKYGGPPPDSVYSGVQPGIGTEVFVGKIPRDLYEDELVPLFEKAGPIWDLRLMMDPLSGQNRGYAFITFCGKEAAQEAVKLCDSYEIRPGKHLGVCISVANNRLFVGSIPKNKTKENILEEFSKVTEGLVDVILYHQPDDKKKNRGFCFLEYEDHKSAAQARRRLMSGKVKVWGNVVTVEWADPVEEPDPEVMAKVKVLFVRNLATTVTEEILEKSFSEFGKLERVKKLKDYAFVHFEDRGAAVKAMDEMNGKEIEGEEIEIVLAKPPDKKRKERQAARQASRSTAYEDYYYHPPPRMPPPIRGRGRGGGRGGYGYPPDYYGYEDYYDDYYGYDYHDYRGGYEDPYYGYDDGYAVRGRGGGRGGRGAPPPPRGRGAPPPRGRAGYSQRGAPLGPPRGSRGGRGGPAQQQRGRGSRGSRGNRGGNVGGKRKADGYNQPDSKRRQTNNQQNWGSQPIAQQPLQQGGDYSGNYGYNNDNQEFYQDTYGQQWK

SEQ ID NO: 44 - protein, 856 aa, Homo sapiens
MDVRRLKVNELREELQRRGLDTRGLKAELAERLQAALEAEEPDDERELDADDEPGRPGHINEEVETEGGSELEGTAQPPPPGLQPHAEPGGYSGPDGHYAMDNITRQNQFYDTQVIKQENESGYERRPLEMEQQQAYRPEMKTEMKQGAPTSFLPPEASQLKPDRQQFQSRKRPYEENRGRGYFEHREDRRGRSPQPPAEEDEDDFDDTLVAIDTYNCDLHFKVARDRSSGYPLTIEGFAYLWSGARASYGVRRGRVCFEMKINEEISVKHLPSTEPDPHVVRIGWSLDSCSTQLGEEPFSYGYGGTGKKSTNSRFENYGDKFAENDVIGCFADFECGNDVELSFTKNGKWMGIAFRIQKEALGGQALYPHVLVKNCAVEFNFGQRAEPYCSVLPGFTFIQHLPLSERIRGTVGPKSKAECEILMMVGLPAAGKTTWAIKHAASNPSKKYNILGTNAIMDKMRVMGLRRQRNYAGRWDVLIQQATQCLNRLIQIAARKKRNYILDQTNVYGSAQRRKMRPFEGFQRKAIVICPTDEDLKDRTIKRTDEEGKDVPDHAVLEMKANFTLPDVGDFLDEVLFIELQREEADKLVRQYNEEGRKAGPPPEKRFDNRGGGGFRGRGGGGGFQRYENRGPPGGNRGGFQNRGGGSGGGGNYRGGFNRSGGGGYSQNRWGNNNRDNNNSNNRGSYNRAPQQQPPPQQPPPPQPPPQQPPPPPSYSPARNPPGASTYNKNSNIPGSSANTSTPTVSSYSPPQPSYSQPPYNQGGYSQGYTAPPPPPPPPPAYNYGSYGGYNPAPYTPPPPPTAQTYPQPSYNQYQQYAQQWNQYYQNQGQWPPYYGNYDYGSYSGNTQGGTSTQ

SEQ ID NO: 45 - protein, 736 aa, Homo sapiens
MGSPLRFDGRVVLVTGAGAGLGRAYALAFAERGALVVVNDLGGDFKGVGKGSLAADKVVEEIRRRGGKAVANYDSVEEGEKVVKTALDAFGRIDVVVNNAGILRDRSFARISDEDWDIIHRVHLRGSFQVTRAAWEHMKKQKYGRIIMTSSASGIYGNFGQANYSAAKLGLLGLANSLAIEGRKSNIHCNTIAPNAGSRMTQTVMPEDLVEALKPEYVAPLVLWLCHESCEENGGLFEVGAGWIGKLRWERTLGAIVRQKNHPMTPEAVKANWKKICDFENASKPQSIQESTGSIIEVLSKIDSEGGVSANHTSRATSTATSGFAGAIGQKLPPFSYAYTELEAIMYALGVGASIKDPKDLKFIYEGSSDFSCLPTFGVIIGQKSMMGGGLAEIPGLSINFAKVLHGEQYLELYKPLPRAGKLKCEAVVADVLDKGSGVVIIMDVYSYSEKELICHNQFSLFLVGSGGFGGKRTSDKVKVAVAIPNRPPDAVLTDTTSLNQAALYRLSGDWNPLHIDPNFASLAGFDKPILHGLCTFGFSARRVLQQFADNDVSRFKAIKARFAKPVYPGQTLQTEMWKEGNRIHFQTKVQETGDIVISNAYVDLAPTSGTSAKTPSEGGKLQSTFVFEEIGRRLKDIGPEVVKKVNAVFEWHITKGGNIGAKWTIDLKSGSGKVYQGPAKGAADTTIILSDEDFMEVVLGKLDPQKAFFSGRLKARGNIMLSQKLQMILKDYAKL

SEQ ID NO: 46 - protein, 361 aa, Homo sapiens
MAPQRAGPGLGKPSSKKSRALRGGPGVPRARQRSPRAAAELNTEVPKPSAKDVEILEQESEVLEPSVEQDAESPGLSTAAGFESPEPGRDDPGPSEAQRAEVQGQHPPPGPKTSSSRSGSEAPHLRFPPCPEAPQRPPEERFMETPIEREIRRSCEREESLRRSRGLSPGRAGRELVELRVRPVLNLPGPGPALPRALERARAGAQMQRDIEREAHRQAALARPAVPEPRARSPPQPLGELKRFFEAAAGSGSSAGAGDGAGPQRLPEPGGRPRSAVQGGCRVLGSAPPPFTPSLLEQEVRAVREREQELQRQRRSVYGTAEFKEPTPSLTASRGDGKLVVIWPPRRKVSENGLEQEERKP

SEQ ID NO: 47 - protein, 240 aa, Homo sapiens [sequence omitted]

SEQ ID NO: 48 - protein, 999 aa, Homo sapiens
MADKVRRQRPRRRVCWALVAVLLADLLALSDTLAVMSVDLGSESMKVAIVKPGVPMEIVLNKESRRKTPVIVTLKENERFFGDSAASMAIKNPKATLRYFQHLLGKQADNPHVALYQARFPEHELTFDPQRQTVHFQISSQLQFSPEEVLGMVLNYSRSLAEDFAEQPIKDAVITVPVFFNQAERRAVLQAARMAGLKVLQLINDNTATALSYGVFRRKDINTTAQNIMFYDMGSGSTVCTIVTYQMVKTKEAGMQPQLQIRGVGFDRTLGGLEMELRLRERLAGLFNEQRKGQRAKDVRENPRAMAKLLREANRLKTVLSANADHMAQIEGLMDDVDFKAKVTRVEFEELCADLFERVPGPVQQALQSAEMSLDEIEQVILVGGATRVPRVQEVLLKAVGKEELGKNINADEAAAMGAVYQAAALSKAFKVKPFVVRDAVVYPILVEFTREVEEEPGIHSLKHNKRVLFSRMGPYPQRKVITFNRYSHDFNFHINYGDLGFLGPEDLRVFGSQNLTTVKLKGVGDSFKKYPDYESKGIKAHFNLDESGVLSLDRVESVFETLVEDSAEEESTLTKLGNTISSLFGGGTTPDAKENGTDTVQEEEESPAEGSKDEPGEQVELKEEAEAPVEDGSQPPPPEPKGDATPEGEKATEKENGDKSEAQKPSEKAEAGPEGVAPAPEGEKKQKPARKRRMVEEIGVELVVLDLPDLPEDKLAQSVQKLQDLTLRDLEKQEREKAANSLEAFIFETQDKLYQPEYQEVSTEEQREEISGKLSAASTWLEDEGVGATTVMLKEKLAELRKLCQGLFFRVEERKKWPERLSALDNLLNHSSMFLKGARLIPEMDQIFTEVEMTTLEKVINETWAWKNATLAEQAKLPATEKPVLLSKDIEAKMMALDREVQYLLNKAKFTKPRPRPKDKNGTRAEPPLNASASDQGEKVIPPAGQTEDAEPISEPEKVETGSEPGDTEPLELGGPGAEPEQKEQSTGQKRPLKNDEL

SEQ ID NO: 49 - protein, 1250 aa, Homo sapiens
MARGDAGRGRGLLALTFCLLAARGELLLPQETTVELSCGVGPLQVILGPEQAAVLNCSLGAAAAGPPTRVTWSKDGDTLLEHDHLHLLPNGSLWLSQPLAPNGSDESVPEAVGVIEGNYSCLAHGPLGVLASQTAVVKLATLADFSLHPESQTVEENGTARFECHIEGLPAPIITWEKDQVTLPEEPRLIVLPNGVLQILDVQESDAGPYRCVATNSARQHFSQEALLSVAHRGSLASTRGQDVVIVAAPENTTVVSGQSVVMECVASADPTPFVSWVRQDGKPISTDVIVLGRTNLLIANAQPWHSGVYVCRANKPRTRDFATAAAELRVLAAPAITQAPEALSRTRASTARFVCRASGEPRPALRWLHNGAPLRPNGRVKVQGGGGSLVITQIGLQDAGYYQCVAENSAGMACAAASLAVVVREGLPSAPTRVTATPLSSSAVLVAWERPEMHSEQIIGFSLHYQKARGMDNVEYQFAVNNDTTELQVRDLEPNTDYEFYVVAYSQLGASRTSTPALVHTLDDVPSAAPQLSLSSPNPSDIRVAWLPLPPSLSNGQVVKYKIEYGLGKEDQIFSTEVRGNETQLMLNSLQPNKVYRVRISAGTAAGFGAPSQWMHHRTPSMHNQSHVPFAPAELKVQAKMESLVVSWQPPPHPTQISGYKLYWREVGAEEEANGDRLPGGRGDQAWDVGPVRLKKKVKQYELTQLVPGRLYEVKLVAFNKHEDGYAAVWKGKTEKAPAPDMPIQRGPPLPPAHVHAESNSSTSIWLRWKKPDFTTVKIVNYTVRFSPWGLRNASLVTYYTSSGEDILIGGLKPFTKYEFAVQSHGVDMDGPFGSVVERSTLPDRPSTPPSDLRLSPLTPSTVRLHWCPPTEPNGEIVEYLILYSSNHTQPEHQWTLLTTQGNIFSAEVHGLESDTRYFFKMGARTEVGPGPFSRLQDVITLQEKLSDSLDMHSVTGIIVGVCLGLLCLLACMCAGLRRSPHRESLPGLSSTATPGNPALYSRARLGPPSPPAAHELESLVHPHPQDWSPPPSDVEDRAEVHSLMGGGVSEGRSHSKRKISWAQPSGLSWAGSWAGCELPQAGPRPALTRALLPPAGTGQTLLLQALVYDAIKGNGRKKSPPACRNQVEAEVIVHSDFSASNGNPDLHLQDLEPEDPLPPEAPDLISGVGDPGQGAAWLDRELGGCELAAPGPDRLTCLPEAASASCSYPDLQPGEVLEETPGDSCQLKSPCPLGASPGLPRSPVSSSA

SEQ ID NO: 50 - protein, 390 aa, Homo sapiens
MRGDRGRGRGGRFGSRGGPGGGFRPFVPHIPFDFYLCEMAFPRVKPAPDETSFSEALLKRNQDLAPNSAEQASILSLVTKINNVIDNLIVAPGTFEVQIEEVRQVGSYKKGTMTTGHNVADLVVILKILPTLEAVAALGNKVVESLRAQDPSEVLTMLTNETGFEISSSDATVKILITTVPPNLRKLDPELHLDIKVLQSALAAIRHARWFEENASQSTVKVLIRLLKDLRIRFPGFEPLTPWILDLLGHYAVMNNPTRQPLALNVAYRRCLQILAAGLFLPGSVGITDPCESGNFRVHTVMTLEQQDMVCYTAQTLVRILSHGGFRKILGQEGDASYLASEISTWDGVIVTPSEKAYEKPPEKKEGEEEEENTEEPPQGEEEESMETQE

SEQ ID NO: 51 - protein, 963 aa, Homo sapiens
MWCLHCNSERTQSLLELELDSGVEGEAPSSETGTSLDSPSAYPQGPLVPGSSLSPDHYEHTSVGAYGLYSGPPGQQQRTRRPKLQHSTSILRKQAEEEAIKRSRSLSESYELSSDLQDKQVEMLERKYGGRLVTRHAARTIQTAFRQYQMNKNFERLRSSMSENRMSRRIVLSNMRMQFSFEGPEKVHSSYFEGKQVSVTNDGSQLGALVSPECGDLSEPTTLKSPAPSSDFADAITELEDAFSRQVKSLAESIDDALNCRSLHTEEAPALDAARARDTEPQTALHGMDHRKLDEMTASYSDVTLYIDEEELSPPLPLSQAGDRPSSTESDLRLRAGGAAPDYWALAHKEDKADTDTSCRSTPSLERQEQRLRVEHLPLLTIEPPSDSSVDLSDRSERGSLKRQSAYERSLGGQQGSPKHGPHSGAPKSLPREEPELRPRPPRPLDSHLAINGSANRQSKSESDYSDGDNDSINSTSNSNDTINCSSESSSRDSLREQTLSKQTYHKEARNSWDSPAFSNDVIRKRHYRIGLNLFNKKPEKGVQYLIERGFVPDTPVGVAHFLLQRKGLSRQMIGEFLGNRQKQFNRDVLDCVVDEMDFSTMELDEALRKFQAHIRVQGEAQKVERLIEAFSQRYCICNPGVVRQFRNPDTIFILAFAIILLNTDMYSPNVKPERKMKLEDFIKNLRGVDDGEDIPREMLMGIYERIRKRELKTNEDHVSQVQKVEKLIVGKKPIGSLHPGLGCVLSLPHRRLVCYCRLFEVPDPNKPQKLGLHQREIFLFNDLLVVTKIFQKKKNSVTYSFRQSFSLYGMQVLLFENQYYPNGIRLTSSVPGADIKVLINFNAPNPQDRKKFTDDLRESIAEVQEMEKHRIESELEKQKGVVRPSMSQCSSLKKESGNGTLSRACLDDSYASGEGLKRSALSSSLRDLSEAGKRGRRSSAGSLESNVEFQPFEPLQPSVLCS

SEQ ID NO: 52 - protein, 1657 aa, Homo sapiens
MSAADEVDGLGVARPHYGSVLDNERLTAEEMDERRRQNVAYEYLCHLEEAKRWMEACLGEDLPPTTELEEGLRNGVYLAKLGNFFSPKVVSLKKIYDREQTRYKATGLHFRHTDNVIQWLNAMDEIGLPKIFYPETTDIYDRKNMPRCIYCIHALSLYLFKLGLAPQIQDLYGKVDFTEEEINNMKTELEKYGIQMPAFSKIGGILANELSVDEAALHAAVIAINEAIDRRIPADTFAALKNPNAMLVNLEEPLASTYQDILYQAKQDKMTNAKNRTENSERERDVYEELLTQAEIQGNINKVNTFSALANIDLALEQGDALALFRALQSPALGLRGLQQQNSDWYLKQLLSDKQQKRQSGQTDPLQKEELQSGVDAANSAAQQYQRRLAAVALINAAIQKGVAEKTVLELMNPEAQLPQVYPFAADLYQKELATLQRQSPEHNLTHPELSVAVEMLSSVALINRALESGDVNTVWKQLSSSVTGLTNIEEENCQRYLDELMKLKAQAHAENNEFITWNDIQACVDHVNLVVQEEHERILAIGLINEALDEGDAQKTLQALQIPAAKLEGVLAEVAQHYQDTLIRAKREKAQEIQDESAVLWLDEIQGGIWQSNKDTQEAQKFALGIFAINEAVESGDVGKTLSALRSPDVGLYGVIPECGETYHSDLAEAKKKKLAVGDNNSKWVKHWVKGGYYYYHNLETQEGGWDEPPNFVQNSMQLSREEIQSSISGVTAAYNREQLWLANEGLITRLQARCRGYLVRQEFRSRMNFLKKQIPAITCIQSQWRGYKQKKAYQDRLAYLRSHKDEVVKIQSLARMHQARKRYRDRLQYFRDHINDIIKIQAFIRANKARDDYKTLINAEDPPMVVVRKFVHLLDQSDQDFQEELDLMKMREEVITLIRSNQQLENDLNLMDIKIGLLVKNKITLQDVVSHSKKLTKKNKEQLSDMMMINKQKGGLKALSKEKREKLEAYQHLFYLLQTNPTYLAKLIFQMPQNKSTKFMDSVIFTLYNYASNQREEYLLLRLFKTALQEEIKSKVDQIQEIVTGNPTVIKMVVSFNRGARGQNALRQILAPVVKEIMDDKSLNIKTDPVDIYKSWVNQMESQTGEASKLPYDVTPEQALAHEEVKTRLDSSIRNMRAVTDKFLSAIVSSVDKIPYGMRFIAKVLKDSLHEKFPDAGEDELLKIIGNLLYYRYMNPAIVAPDAFDIIDLSAGGQLTTDQRRNLGSIAKMLQHAASNKMFLGDNAHLSIINEYLSQSYQKFRRFFQTACDVPELQDKFNVDEYSDLVTLTKPVIYISIGEIINTHTLLLDHQDAIAPEHNDPIHELLDDLGEVPTIESLIGESSGNLNDPNKEALAKTEVSLTLTNKFDVPGDENAEMDARTILLNTKRLIVDVIRFQPGETLTEILETPATSEQEAEHQRAMQRRAIRDAKTPDKMKKSKSVKEDSNLTLQEKKEKIQTGLKKLTELGTVDPKNKYQELINDIARDIRNQRRYRQRRKAELVKLQQTYAALNSKATFYGEQVDYYKSYIKTCLDNLASKGKVSKKPREMKGKKSKKISLKYTAARLHEKGVLLEIEDLQVNQFKNVIFEISPTEEVGDFEVKAKFMGVQMETFMLHYQDLLQLQYEGVAVMKLFDRAKVNVNLLIFLLNKKFYGK

SEQ ID NO: 53 - protein, 745 aa, Homo sapiens
MEVMNLMEQPIKVTEWQQTYTYDSGIHSGANTCVPSVSSKGIMEEDEACGRQYTLKKTTTYTQGVPPSQGDLEYQMSTTARAKRVREAMCPGVSGEDSSLLLATQVEGQATNLQRLAEPSQLLKSAIVHLINYQDDAELATRALPELTKLLNDEDPVVVTKAAMIVNQLSKKEASRRALMGSPQLVAAVVRTMQNTSDLDTARCTTSILHNLSHHREGLLAIFKSGGIPALVRMLSSPVESVLFYAITTLHNLLLYQEGAKMAVRLADGLQKMVPLLNKNNPKFLAITTDCLQLLAYGNQESKLIILANGGPQALVQIMRNYSYEKLLWTTSRVLKVLSVCPSNKPAIVEAGGMQALGKHLTSNSPRLVQNCLWTLRNLSDVATKQEGLESVLKILVNQLSVDDVNVLTCATGTLSNLTCNNSKNKTLVTQNSGVEALIHAILRAGDKDDITEPAVCALRHLTSRHPEAEMAQNSVRLNYGIPAIVKLLNQPNQWPLVKATIGLIRNLALCPANHAPLQEAAVIPRLVQLLVKAHQDAQRHVAAGTQQPYTDGVRMEEIVEGCTGALHILARDPMNRMEIFRLNTIPLFVQLLYSSVENIQRVAAGVLCELAQDKEAADAIDAEGASAPLMELLHSRNEGTATYAAAVLFRISEDKNPDYRKRVSVELTNSLFKHDPAAWEAAQSMIPINEPYGDDMDATYRPMYSSDVPLDPLEMHMDMDGDYPIDTYSDGLRPPYPTADHMLA

SEQ ID NO: 54 - protein, 445 aa, Homo sapiens [sequence omitted]

SEQ ID NO: 55 - protein, 1435 aa, Homo sapiens
MAQCVQSVQELIPDSFVPCVAALCSDEAERLTRLNHLSFAELLKPFSRLTSEVHMRDPNNQLHVIKNLKIAVSNIVTQPPQPGAIRKLLNDVVSGSQPAEGLVANVITAGDYDLNISATTPWFESYRETFLQSMPALDHEFLNHYLACMLVASSSEAEPVEQFSKLSQEQHRIQHNSDYSYPKWFIPNTLKYYVLLHDVSAGDEQRAESIYEEMKQKYGTQGCYLLKINSRTSNRASDEQIPDPWSQYLQKNSIQNQESYEDGPCTITSNKNSDNNLLSLDGLDNEVKDGLPNNFRAHPLQLEQSSDPSNSIDGPDHLRSASSLHETKKGNTGIIHGACLTLTDHDRIRQFIQEFTFRGLLPHIEKTIRQLNDQLISRKGLSRSLFSATKKWFSGSKVPEKSINDLKNTSGLLYPPEAPELQIRKMADLCFLVQHYDLAYSCYHTAKKDFLNDQAMLYAAGALEMAAVSAFLQPGAPRPYPAHYMDTAIQTYRDICKNMVLAERCVLLSAELLKSQSKYSEAAALLIRLTSEDSDLRSALLLEQAAHCFINMKSPMVRKYAFHMILAGHRFSKAGQKKHALRCYCQAMQVYKGKGWSLAEDHINFTIGRQSYTLRQLDNAVSAFRHILINESKQSAAQQGAFLREYLYVYKNVSQLSPDGPLPQLPLPYINSSATRVFFGHDRRPADGEKQAATHVSLDQEYDSESSQQWRELEEQVVSVVNKGVIPSNFHPTQYCLNSYSDNSRFPLAVVEEPITVEVAFRNPLKVLLLLTDLSLLWKFHPKDFSGKDNEEVKQLVTSEPEMIGAEVISEFLINGEESKVARLKLFPHHIGELHILGVVYNLGTIQGSMTVDGIGALPGCHTGKYSLSMSVRGKQDLEIQGPRLNNTKEEKTSVKYGPDRRLDPIITEEMPLLEVFFIHFPTGLLCGEIRKAYVEFVNVSKCPLTGLKVVSKRPEFFTFGGNTAVLTPLSPSASENCSAYKTVVTDATSVCTALISSASSVDFGIGTGSQPEVIPVPLPDTVLLPGASVQLPMWLRGPDEEGVHEINFLFYYESVKKQPKIRHRILRHTAIICTSRSLNVRATVCRSNSLENEEGRGGNMLVFVDVENTNTSEAGVKEFHIVQVSSSSKHWKLQKSVNLSENKDTKLASREKGKFCFKAIRCEKEEAATQSSEKYTFADIIFGNEQIISSASPCADFFYRSLSSELKKPQAHLPVHTEKQSTEDAVRLIQKCSEVDLNIVILWKAYVVEDSKQLILEGQHHVILRTIGKEAFSYPQKQEPPEMELLKFFRPENITVSSRPSVEQLSSLIKTSLHYPESFNHPFHQKSLCLVPVTLLLSNCSKADVDVIVDLRHKTTSPEALEIHGSFTWLGQTQYKLQLKSQEIHSLQLKACFVHTGVYNLGTPRVFAKLSDQVTVFETSQQNSMPALIIISNV

SEQ ID NO: 56 - protein, 1328 aa, Homo sapiens
LHSNPEPKTFTFDHVADVDTTQESVFATVAKSIVESCMSGYNGTIFAYGQTGSGKTFTMMGPSESDNFSHNLRGVIPRSFEYLFSLIDREKEKAGAGKSFLCKCSFIEIYNEQIYDLLDSASAGLYLREHIKKGVFVVGAVEQVVTSAAEAYQVLSGGWRNRRVASTSMNRESSRSHAVFTITIESMEKSNEIVNIRTSLLNLVDLAGSERQKDTHAEGMRLKEAGNINRSLSCLGQVITALVDVGNGKQRHVCYRDSKLTFLLRDSLGGNAKTAIIANVHPGSRCFGETLSTLNFAQRAKLIKNKAVVNEDTQGNVSQLQAEVKRLKEQLAELASGQTPPESFLTRDKKKTNYMEYFQEAMLFFKKSEQEKKSLIEKVTQLEDLTLKKEKFIQSNKMIVKFREDQIIRLEKLHKESRGGFLPEEQDRLLSELRNEIQTLREQIEHHPRVAKYAMENHSLREENRRLRLLEPVKRAQEMDAQTIAKLEKAFSEISGMEKSDKNQQGFSPKAQKEPCLFANTEKLKAQLLQIQTELNNSKQEYEEFKELTRKRQLELESELQSLQKANLNLENLLEATKACKRQEVSQLNKIHAETLKIITTPTKAYQLHSRPVPKLSPEMGSFGSLYTQNSSILDNDILNEPVPPEMNEQAFEAISEELRTVQEQMSALQAKLDEEEHKNLKLQQHVDKLEHHSTQMQELFSSERIDWTKQQEELLSQLNVLEKQLQETQTKNDFLKSEVHDLRVVLHSADKELSSVKLEYSSFKTNQEKEFNKLSERHMHVQLQLDNLRLENEKLLESKACLQDSYDNLQEIMKFEIDQLSRNLQNFKKENETLKSDLNNLMELLEAEKERNNKLSLQFEEDKENSSKEILKVLEAVRQEKQKETAKCEQQMAKVQKLEESLLATEKVISSLEKSRDSDKKVVADLMNQIQELRTSVCEKTETIDTLKQELKDINCKYNSALVDREESRVLIKKQEVDILDLKETLRLRILSEDIERDMLCEDLAHATEQLNMLTEASKKHSGLLQSAQEELTKKEALIQELQHKLNQKKEEVEQKKNEYNFKMRQLEHVMDSAAEDPQSPKTPPHFQTHLAKLLETQEQEIEDGRASKTSLEHLVTKLNEDREVKNAEILRMKEQLREMENLRLESQQLIEKNWLLQGQLDDIKRQKENSDQNHPDNQQLKNEQEESIKERLAKSKIVEEMLKMKADLEEVQSALYNKEMECLRMTDEVERTQTLESKAFQEKEQLRSKLEEMYEERERTSQEMEMLRKQVECLAEENGKLVGHQNLHQKIQYVVRLKKENVRLAEETEKLRAENVFLKEKKRSES

SEQ ID NO: 57 - protein, 600 aa, Homo sapiens
MATPLPGRAGGPATPLSPTRLSRLQEKEELRELNDRLAHYIDRVRALELENDRLLLKISEKEEVTTREVSGIKALYESELADARRVLDETARERARLQIEIGKLRAELDEVNKSAKKREGELTVAQGRVKDLESLFHRSEVELAAALSDKRGLESDVAELRAQLAKAEDGHAVAKKQLEKETLMRVDLENRCQSLQEELDFRKSVFEEEVRETRRRHERRLVEVDSSRQQEYDFKMAQALEELRSQHDEQVRLYKLELEQTYQAKLDSAKLSSDQNDKAASAAREELKEARMRLESLSYQLSGLQKQASAAEDRIRELEEAMAGERDKFRKMLDAKEQEMTEMRDVMQQQLAEYQELLDVKLALDMEINAYRKLLEGEEERLKLSPSPSSRVTVSRATSSSSGSLSATGRLGRSKRKRLEVEEPLGSGPSVLGTGTGGSGGFHLAQQASASGSVSIEEIDLEGKFVQLKNNSDKDQSLGNWRIKRQVLEGEEIAYKFTPKYILRAGQMVTVWAAGAGVAHSPPSTLVWKGQSSWGTGESFRTVLVNADGEEVAMRTVKKSSVMRENENGEEEEEEAEFGEEDLFHQQGDPRTTSRGCYVM

SEQ ID NO: 58 - protein, 1761 aa, Homo sapiens
MQFQLTLFLHLGWLSYSKAQDDCNRGACHPTTGDLLVGRNTQLMASSTCGLSRAQKYCILSYLEGEQKCFICDSRFPYDPYDQPNSHTIENVIVSFEPDREKKWWQSENGLDHVSIRLDLEALFRFSHLILTFKTFRPAAMLVERSTDYGHNWKVFKYFAKDCATSFPNITSGQAQGVGDIVCDSKYSDIEPSTGGEVVLKVLDPSFEIENPYSPYIQDLVTLTNLRINFTKLHTLGDALLGRRQNDSLDKYYYALYEMIVRGSCFCNGHASECRPMQKMRGDVFSPPGMVHGQCVCQHNTDGPNCERCKDFFQDAPWRPAADLQDNACRSCSCNSHSSRCHFDMTTYLASGGLSGGVCEDCQHNTEGQHCDRCRPLFYRDPLKTISDPYACIPCECDPDGTISGGICVSHSDPALGSVAGQCLCKENVEGAKCDQCKPNHYGLSATDPLGCQPCDCNPLGSLPFLTCDVDTGQCLCLSYVTGAHCEECTVGYWGLGNHLHGCSPCDCDIGGAYSNVCSPKNGQCECRPHVTGRSCSEPAPGYFFAPLNFYLYEAEEATTLQGLAPLGSETFGQSPAVHVVLGEPVPGNPVTWTGPGFARVLPGAGLRFAVNNIPFPVDFTIAIHYETQSAADWTVQIVVNPPGGSEHCIPKTLQSKPQSFALPAATRIMLLPTPICLEPDVQYSIDVYFSQPLQGESHAHSHVLVDSLGLIPQINSLENFCSKQDLDEYQLHNCVEIASAMGPQVLPGACERLIISMSAKLHDGAVACKCHPQGSVGSSCSRLGGQCQCKPLVVGRCCDRCSTGSYDLGHHGCHPCHCHPQGSKDTVCDQVTGQCPCHGEVSGRRCDRCLAGYFGFPSCHPCPCNRFAELCDPETGSCFNCGGFTTGRNCERCIDGYYGNPSSGQPCRPCLCPDDPSSNQYFAHSCYQNLWSSDVICNCLQGYTGTQCGECSTGFYGNPRISGAPCQPCACNNNIDVTDPESCSRVTGECLRCLHNTQGANCQLCKPGHYGSALNQTCRRCSCHASGVSPMECPPGGGACLCDPVTGACPCLPNVTGLACDRCADGYWNLVPGRGCQSCDCDPRTSQSSHCDQLTGQCPCKLGYGGKRCSECQENYYGDPPGRCIPCDCNRAGTQKPICDPDTGMCRCREGVSGQRCDRCARGHSQEFPTCLQCHLCFDQWDHTISSLSKAVQGLMRLAANMEDKRETLPVCEADFKDLRGNVSEIERILKHPVFPSGKFLKVKDYHDSVRRQIMQLNEQLKAVYEFQDLKDTIERAKNEADLLLEDLQEEIDLQSSVLNASIADSSENIKKYYHISSSAEKKINETSSTINTSANTRNDLLTILDTLTSKGNLSLERLKQIKIPDIQILNEKVCGDPGNVPCVPLPCGGALCTGRKGHRKCRGPGCHGSLTLSTNALQKAQEAKSIIRNLDKQVRGLKNQIESISEQAEVSKNNALQLREKLGNIRNQSDSEEENINLFIKKVKNFLLEENVPPEDIEKVANGVLDIHLPIPSQNLTDELVKIQKHMQLCEDYRTDENRLNEEADGAQKLLVKAKAAEKAANILLNLDKTLNQLQQAQITQGRANSTITQLTANITKIKKNVLQAENQTREMKSELELAKQRSGLEDGLSLLQTKLQRHQDHAVNAKVQAESAQHQAGSLEKEFVELKKQYAILQRKTSTTGLTKETLGKVKQLKDAAEKLAGDTEAKIRRITDLERKIQDLNLSRQAKADQLRILEDQVVAIKNEIVEQEKKYARCYS

SEQ ID NO: 59 - protein, 519 aa, Homo sapiens
MFLLPLPAAGRVVVRRLAVRRFGSRSLSTADMTKGLVLGIYSKEKEDDVPQFTSAGENFDKLLAGKLRETLNISGPPLKAGKTRTFYGLHQDFPSVVLVGLGKKAAGIDEQENWHEGKENIRAAVAAGCRQIQDLELSSVEVDPCGDAQAAAEGAVLGLYEYDDLKQKKKMAVSAKLYGSGDQEAWQKGVLFASGQNLARQLMETPANEMTPTRFAEIIEKNLKSASSKTEVHIRPKSWIEEQAMGSFLSVAKGSDEPPVFLEIHYKGSPNANEPPLVFVGKGITFDSGGISIKASANMDLMRADMGGAATICSAIVSAAKLNLPINIIGLAPLCENMPSGKANKPGDVVRAKNGKTIQVDNTDAEGRLILADALCYAHTFNPKVILNAATLTGAMDVALGSGATGVFTNSSWLWNKLFEASIETGDRVWRMPLFEHYTRQVVDCQLADVNNIGKYRSAGACTAAAFLKEFVTHPKWAHLDIAGVMTNKDEVPYLRKGMTGRPTRTLIEFLLRFSQDNA

SEQ ID NO: 60 - protein, 808 aa, Homo sapiens
MTSPAAAQSREIDCLSPEAQKLAEARLAAKRAARAEAREIRMKELERQQKEEDSERYSRRSRRNTSASDEDERMSVGSRGSLRVEERPEKDFTEKGSRNMPGLSAATLASLGGTSSRRGSGDTSISIDTEASIREIKELNELKDQIQDVEGKYMQGLKEMKDSLAEVEEKYKKAMVSNAQLDNEKTNFMYQVDTLKDMLLELEEQLAESRRQYEEKNKEFEREKHAHSILQFQFAEVKEALKQREEMLEKHGIILNSEIATNGETSDTLNNVGYQGPTKMTKEELNALKSTGDGTLGRASEVEVKNEIVANVGKREILHNTEKEQHTEDTVKDCVDIEVFPAGENTEDQKSSEDTAPFLGTLAGATYEEQVQSQILESSSLPENTVQVESNEVMGAPDDRTRTPLEPSNCWSDLDGGNHTENVGEAAVTQVEEQAGTVASCPLGHSDDTVYHDDKCMVEVPQELETSTGHSLEKEFTNQEAAEPKEVPAHSTEVGRDHNEEEGEETGLRDEKPIKTEVPGSPAGTEGNCQEATGPSTVDTQNEPLDMKEPDEEKSDQQGEALDSSQKKTKNKKKKNKKKKSPVPVETLKDVKKELTYQNTDLSEIKEEEQVKSTDRKSAVEAQNEVTENPKQKIAAESSENVDCPENPKIKLDGKLDQEGDDVQTAAEEVLADGDTLDFEDDTVQSSGPRAGGEELDEGVAKDNAKIDGATQSSPAEPKSEDADRCTLPEHESPSQDISDACEAESTERCEMSEHPSQTVRKALDSNSLENDDLSAPGREPGHFNPESREDTRGGNEKGKSKEDCTMS

SEQ ID NO: 61 - protein, 583 aa, Homo sapiens
MAAAAVSESWPELELAERERRRELLLTGPGLEERVRAAGGQLPPRLFTLPLLHYLEVSGCGSLRAPGPGLAQGLPQLHSLVLRRNALGPGLSPELGPLPALRVLDLSGNALEALPPGQGLGPAEPPGLPQLQSLNLSGNRLRELPADLARCAPRLQSLNLTGNCLDSFPAELFRPGALPLLSELAAADNCLRELSPDIAHLASLKTLDLSNNQLSEIPAELADCPKLKEINFRGNKLRDKRLEKMVSGCQTRSILEYLRVGGRGGGKGKGRAEGSEKEESRRKRRERKQRREGGDGEEQDVGDAGRLLLRVLHVSENPVPLTVRVSPEVRDVRPYIVGAVVRGMDLQPGNALKRFLTSQTKLHEDLCEKRTAATLATHELRAVKGPLLYCARPPQDLKIVPLGRKEAKAKELVRQLQLEAEEQRKQKKRQSVSGLHRYLHLLDGNENYPCLVDADGDVISFPPITNSEKTKVKKTTSDLFLEVTSATSLQICKDVMDALILKMAEMKKYTLENKEEGSLSDTEADAVSGQLPDPTTNPSAGKDGPSLLVVEQVRVVDLEGSLKVVYPSKADLATAPPHVTVVR

SEQ ID NO: 62 - protein, 611 aa, Homo sapiens
MPEIVDTCSLASPASVCRTKHLHLRCSVDFTRRTLTGTAALTVQSQEDNLRSLVLDTKDLTIEKVVINGQEVKYALGERQSYKGSPMEISLPIALSKNQEIVIEISFETSPKSSALQWLTPEQTSGKEHPYLFSQCQAIHCRAILPCQDTPSVKLTYTAEVSVPKELVALMSAIRDGETPDPEDPSRKIYKFIQKVPIPCYLIALVVGALESRQIGPRTLVWSEKEQVEKSAYEFSETESMLKIAEDLGGPYVWGQYDLLVLPPSFPYGGMENPCLTFVTPTLLAGDKSLSNVIAHEISHSWTGNLVTNKTWDHFWLNEGHTVYLERHICGRLFGEKFRHFNALGGWGELQNSVKTFGETHPFTKLVVDLTDIDPDVAYSSVPYEKGFALLFYLEQLLGGPEIFLGFLKAYVEKFSYKSITTDDWKDFLYSYFKDKVDVLNQVDWNAWLYSPGLPPIKPNYDMTLTNACIALSQRWITAKEDDLNSFNATDLKDLSSHQLNEFLAQTLQRAPLPLGHIKRMQEVYNFNAINNSEIRFRWLRLCIQSKWEDAIPLALKMATEQGRMKFTRPLFKDLAAFDKSHDQAVRTYQEHKASMHPVTAMLVGKDLKVD

SEQ ID NO: 63 - protein, 261 aa, Homo sapiens
MNPNCARCGKIVYPTEKVNCLDKFWHKACFHCETCKMTLNMKNYKGYEKKPYCNAHYPKQSFTMVADTPENLRLKQQSELQSQVRYKEEFEKNKGKGFSVVADTPELQRIKKTQDQISNIKYHEEFEKSRMGPSGGEGMEPERRDSQDGSSYRRPLEQQQPHHIPTSAPVYQQPQQQPVAQSYGGYKEPAAPVSIQRSAPGGGGKRYRAVYDYSAADEDEVSFQDGDTIVNVQQIDDGWMYGTVERTGDTGMLPANYVEAI

SEQ ID NO: 64 - protein, 338 aa, Homo sapiens
MSLSAFTLFLALIGGTSGQYYDYDFPLSIYGQSSPNCAPECNCPESYPSAMYCDELKLKSVPMVPPGIKYLYLRNNQIDHIDEKAFENVTDLQWLILDHNLLENSKIKGRVFSKLKQLKKLHINHNNLTESVGPLPKSLEDLQLTHNKITKLGSFEGLVNLTFIHLQHNRLKEDAVSAAFKGLKSLEYLDLSFNQIARLPSGLPVSLLTLYLDNNKISNIPDEYFKRFNALQYLRLSHNELADSGIPGNSFNVSSLVELDLSYNKLKNIPTVNENLENYYLEVNQLEKFDIKSFCKILGPLSYSKIKHLRLDGNRISETSLPPDMYECLRVANEVTLN

SEQ ID NO: 65 - protein, 115 aa, Homo sapiens
MPMFIVNTNVPRASVPDGFLSELTQQLAQATGKPPQYIAVHVVPDQLMAFGGSSEPCALCSLHSIGKIGGAQNRSYSKLLCGLLAERLRISPDRVYINYYDMNAANVGWNNSTFA

SEQ ID NO: 66 - protein, 334 aa, Homo sapiens
MSEPIRVLVTGAAGQIAYSLLYSIGNGSVFGKDQPIILVLLDITPMMGVLDGVLMELQDCALPLLKDVIATDKEDVAFKDLDVAILVGSMPRREGMERKDLLKANVKIFKSQGAALDKYAKKSVKVIVVGNPANTNCLTASKSAPSIPKENFSCLTRLDHNRAKAQIALKLGVTANDVKNVIIWGNHSSTQYPDVNHAKVKLQGKEVGVYEALKDDSWLKGEFVTTVQQRGAAVIKARKLSSAMSAAKAICDHVRDIWFGTPEGEFVSMGVISDGNSYGVPDDLLYSFPVVIKNKTWKFVEGLPINDFSREKMDLTAKELTEEKESAFEFLSSA

SEQ ID NO: 67 - protein, 5430 aa, Homo sapiens
MSSSDEETLSERSCRSERSCRSERSYRSERSGSLSPCPPGDTLPWNLPLHEQKKRKSQDSVLDPAERAVVRVADERDRVQKKTFTKWVNKHLMKVRKHINDLYEDLRDGHNLISLLEVLSGIKLPREKGRMRFHRLQNVQIALDFLKQRQVKLVNIRNDDITDGNPKLTLGLIWTIILHFQISDIYISGESGDMSAKEKLLLWTQKVTAGYTGIKCTNFSSCWSDGKMFNALIHRYRPDLVDMERVQIQSNRENLEQAFEVAERLGVTRLLDAEDVDVPSPDEKSVITYVSSIYDAFPKVPEGGEGISATEVDSRWQEYQSRVDSLIPWIKQHTILMSDKTFPQNPVELKALYNQYIHFKETEILAKEREKGRIEELYKLLEVWIEFGRIKLPQGYHPNDVEEEWGKLIIEMLEREKSLRPAVERLELLLQIANKIQNGALNCEEKLTLAKNTLQADAAHLESGQPVQCESDVIMYIQECEGLIRQLQVDLQILRDENYYQLEELAFRVMRLQDELVTLRLECTNLYRKGHFTSLELVPPSTLTTTHLKAEPLTKATHSSSTSWFRKPMTRAELVAISSSEDEGNLRFVYELLSWVEEMQMKLERAEWGNDLPSVELQLETQQHIHTSVEELGSSVKEARLYEGKMSQNFHTSYAETLGKLETQYCKLKETSSFRMRHLQSLHKFVSRATAELIWLNEKEEEELAYDWSDNNSNISAKRNYFSELTMELEEKQDVFRSLQDTAELLSLENHPAKQTVEAYSAAVQSQLQWMKQLCLCVEQHVKENTAYFQFFSDARELESFLRNLQDSIKRKYSCDHNTSLSRLEDLLQDSMDEKEQLIQSKSSVASLVGRSKTIVQLKPRSPDHVLKNTISVKAVCDYRQIEITICKNDECVLEDNSQRTKWKVISPTGNEAMVPSVCFLIPPPNKDAIEMASRVEQSYQKVMALWHQLHVNTKSLISWNYLRKDLDLVQTWNLEKLRSSAPGECHQIMKNLQAHYEDFLQDSRDSVLFSVADRLRLEEEVEACKARFQHLMKSMENEDKEETVAKMYISELKNIRLRLEEYEQRVVKRIQSLASSRTDRDAWQDNALRIAEQEHTQEDLQQLRSDLDAVSMKCDSFLHQSPSSSSVPTLRSELNLLVEKMDHVYGLSTVYLNKLKTVDVIVRSIQDAELLVKGYEIKLSQEEVVLADLSALEAHWSTLRHWLSDVKDKNSVFSVLDEEIAKAKVVAEQMSRLTPERNLDLERYQEKGSQLQERWHRVIAQLEIRQSELESIQEVLGDYRACHGTLIKWIEETTAQQEMMKPGQAEDSRVLSEQLSQQTALFAEIERNQTKLDQCQKFSQQYSTIVKDYELQLMTYKAFVESQQKSPGKRRRMLSSSDAITQEFMDLRTRYTALVTLTTQHVKYISDALRRLEEEEKVVEEEKQEHVEKVKELLGWVSTLARNTQGKATSSETKESTDIEKAILEQQVLSEELTTKKEQVSEAIKTSQIFLAKHGHKLSEKEKKQISEQLNALNKAYHDLCDGSANQLQQLQSQLAHQTEQKTLQKQQNTCHQQLEDLCSWVGQAERALAGHQGRTTQQDLSALQKNQSDLKDLQDDIQNRATSFATVVKDIEGFMEENQTKLSPRELTALREKLHQAKEQYEALQEETRVAQKELEEAVTSALQQETEKSKAAKELAENKKKIDALLDWVTSVGSSGGQLLTNLPGMEQLSGASLEKGALDTTDGYMGVNQAPEKLDKQCEMMKARHQELLSQQQNFILATQSAQAFLDQHGHNLTPEEQQMLQQKLGELKEQYSTSLAQSEAELKQVQTLQDELQKFLQDHKEFESWLERSEKELENMHKGGSSPETLPSLLKRQGSFSEDVISHKGDLRFVTISGQKVLDMENSFKEGKEPSEIGNLVKDKLKDATERYTALHSKCTRLGSHLNMLLGQYHQFQNSADSLQAWMQACEANVEKLLSDTVASDPGVLQEQLATTKQLQEELAEHQVPVEKLQKVARDIMEIEGEPAPDHRHVQETTDSILSHFQSLSYSLAERSSLLQKAIAQSQSVQESLESLLQSIGEVEQNLEGKQVSSLSSGVIQEALATNMKLKQDIARQKSSLEATREMVTRFMETADSTTAAVLQGKLAEVSQRFEQLCLQQQEKESSLKKLLPQAEMFEHLSGKLQQFMENKSRMLASGNQPDQDITHFFQQIQELNLEMEDQQENLDTLEHLVTELSSCGFALDLCQHQDRVQNLRKDFTELQKTVKEREKDASSCQEQLDEFRKLVRTFQKWLKETEGSIPPTETSMSAKELEKQIEHLKSLLDDWASKGTLVEEINCKGTSLENLIMEITAPDSQGKTGSILPSVGSSVGSVNGYHTCKDLTEIQCDMSDVNLKYEKLGGVLHERQESLQAILNRMEEVHKEANSVLQWLESKEEVLKSMDAMSSPTKTETVKAQAESNKAFLAELEQNSPKIQKVKEALAGLLVTYPNSQEAENWKKIQEELNSRWERATEVTVARQRQLEESASHLACFQAAESQLRPWLMEKELMMGVLGPLSIDPNMLNAQKQQVQFMLKEFEARRQQHEQLNEAAQGILTGPGDVSLSTSQVQKELQSINQKWVELTDKLNSRSSQIDQAIVKSTQYQELLQDLSEKVRAVGQRLSVQSAISTQPEAVKQQLEETSEIRSDLEQLDHEVKEAQTLCDELSVLIGEQYLKDELKKRLETVALPLQGLEDLAADRINRLQAALASTQQFQQMFDELRTWLDDKQSQQAKNCPISAKLERLQSQLQENEEFQKSLNQHSGSYEVIVAEGESLLLSVPPGEEKRTLQNQLVELKNHWEELSKKTADRQSRLKDCMQKAQKYQWHVEDLVPWIEDCKAKMSELRVTLDPVQLESSLLRSKAMLNEVEKRRSLLEILNSAADILINSSEADEDGIRDEKAGINQNMDAVTEELQAKTGSLEEMTQRLREFQESFKNIEKKVEGAKHQLEIFDALGSQACSNKNLEKLRAQQEVLQALEPQVDYLRNFTQGLVEDAPDGSDASQLLHQAEVAQQEFLEVKQRVNSGCVMMENKLEGIGQFHCRVREMFSQLADLDDELDGMGAIGRDTDSLQSQIEDVRLFLNKIHVLKLDIEASEAECRHMLEEEGTLDLLGLKRELEALNKQCGKLTERGKARQEQLELTLGRVEDFYRKLKGLNDATTAAEEAEALQWVVGTEVEIINQQLADFKMFQKEQVDPLQMKLQQVNGLGQGLIQSAGKDCDVQGLEHDMEEINARWNTLNKKVAQRIAQLQEALLHCGKFQDALEPLLSWLADTEELIANQKPPSAEYKVVKAQIQEQKLLQRLLDDRKATVDMLQAEGGRIAQSAELADREKITGQLESLESRWTELLSKAAARQKQLEDILVLAKQFHETAEPISDFLSVTEKKLANSEPVGTQTAKIQQQIIRHKALEEDIENHATDVHQAVKIGQSLSSLTSPAEQGVLSEKIDSLQARYSEIQDRCCRKAALLDQALSNARLFGEDEVEVLNWLAEVEDKLSSVFVKDFKQDVLHRQHADHLALNEEIVNRKKNVDQAIKNGQALLKQTTGEEVLLIQEKLDGIKTRYADITVTSSKALRTLEQARQLATKFQSTYEELTGWLREVEEELATSGGQSPTGEQIPQFQQRQKELKKEVMEHRLVLDTVNEVSRALLELVPWRAREGLDKLVSDANEQYKLVSDTIGQRVDEIDAAIQRSQQYEQAADAELAWVAETKRKLMALGPIRLEQDQTTAQLQVQKAFSIDIIRHKDSMDELFSHRSEIFGTCGEEQKTVLQEKTESLIQQYEAISLLNSERYARLERAQVLVNQFWETYEELSPWIEETRALIAQLPSPAIDHEQLRQQQEEMRQLRESIAEHKPHIDKLLKIGPQLKELNPEEGEMVEEKYQKAENMYAQIKEEVRQRALALDEAVSQSTQITEFHDKIEPMLETLENLSSRLRMPPLIPAEVDKIRECISDNKSATVELEKLQPSFEALKRRGEELIGRSQGADKDLAAKEIQDKLDQMVFFWEDIKARAEEREIKFLDVLELAEKFWYDMAALLTTIKDTQDIVHDLESPGIDPSIIKQQVEAAETIKEETDGLHEELEFIRILGADLIFACGETEKPEVRKSIDEMNNAWENLNKTWKERLEKLEDAMQAAVQYQDTLQAMFDWLDNTVIKLCTMPPVGTDLNTVKDQLNEMKEFKVEVYQQQIEMEKLNHQGELMLKKATDETDRDIIREPLTELKHLWENLGEKIAHRQHKLEGALLALGQFQHALEELMSWLTHTEELLDAQRPISGDPKVIEVELAKHHVLKNDVLAHQATVETVNKAGNELLESSAGDDASSLRSRLEAMNQCWESVLQKTEEREQQLQSTLQQAQGFHSEIEDFLLELTRMESQLSASKPTGGLPETAREQLDTHMELYSQLKAKEETYNQLLDKGRLMLLSRDDSGSGSKTEQSVALLEQKWHVVSSKMEERKSKLEEALNLATEFQNSLQEFINWLTLAEQSLNIASPPSLILNTVLSQIEEHKVFANEVNAHRDQIIELDQTGNQLKFLSQKQDVVLIKNLLVSVQSRWEKVVQRSIERGRSLDDARKRAKQFHEAWKKLIDWLEDAESHLDSELEISNDPDKIKLQLSKHKEFQKTLGGKQPVYDTTIRTGRALKEKTLLPEDSQKLDNFLGEVRDKWDTVCGKSVERQHKLEEALLFSGQFMDALQALVDWLYKVEPQLAEDQPVHGDLDLVMNLMDAHKVFQKELGKRTGTVQVLKRSGRELIENSRDDTTWVKGQLQELSTRWDTVCKLSVSKQSRLEQALKQAEVFRDTVHMLLEWLSEAEQTLRFRGALPDDTEALQSLIDTHKEFMKKVEEKRVDVNSAVAMGEVILAVCHPDCITTIKHWITIIRARFEEVLTWAKQHQQRLETALSELVANAELLEELLAWIQWAETTLIQRDQEPIPQNIDRVKALIAEHQTFMEEMTRKQPDVDRVTKTYKRKNIEPTHAPFIEKSRSGGRKSLSQPTPPPMPILSQSEAKNPRINQLSARWQQVWLLALERQRKLNDALDRLEELKEFANFDFDVWRKKYMRWMNHKKSRVMDFFRRIDKDQDGKITRQEFIDGILASKFPTTKLEMTAVADIFDRDGDGYIDYYEFVAALHPNKDAYRPTTDADKIEDEVTRQVAQCKCAKRFQVEQIGENKYRFGDSQQLRLVRILRSTVMVRVGGGWMALDEFLVKNDPCRARGRTNIELREKFILPEGASQGMTPFRSRGRRSKPSSRAASPTRSSSSASQSNHSCTSMPSSPATPASGTKVIPSSGSKLKRPTPTFHSSRTSLAGDTSNSSSPASTGAKTNRADPKKSASRPGSRAGSRAGSRASSRRGSDASDFDLLETQSACSDTSESSAAGGQGNSRRGLNKPSKIPTMSKKTTTASPRTPGPKR

SEQ ID NO: 68 - protein, 5030 aa, Homo sapiens [sequence omitted]

SEQ ID NO: 69 - protein, 1093 aa, Homo sapiens [sequence omitted]

SEQ ID NO: 70 - protein, 594 aa, Homo sapiens
MVLLHVLFEHAVGYALLALKEVEEISLLQPQVEESVLNLGKFHSIVRLVAFCPFASSQVALENANAVSEGVVHEDLRLLLETHLPSKKKKVLLGVGDPKIGAAIQEELGYNCQTGGVIAEILRGVRLHFHNLVKGLTDLSACKAQLGLGHSYSRAKVKFNVNRVDNMIIQSISLLDQLDKDINTFSMRVREWYGYHFPELVKIINDNATYCRLAQFIGNRRELNEDKLEKLEELTMDGAKAKAILDASRSSMGMDISAIDLINIESFSSRVVSLSEYRQSLHTYLRSKMSQVAPSLSALIGEAVGARLIAHAGSLTNLAKYPASTVQILGAEKALFRALKTRGNTPKYGLIFHSTFIGRAAAKNKGRISRYLANKCSIASRIDCFSEVPTSVFGEKLREQVEERLSFYETGEIPRKNLDVMKEAMVQAEEAAAEITRKLEKQEKKRLKKEKKRLAALALASSENSSSTPEECEEMSEKPKKKKKQKPQEVPQENGMEDPSISFSKPKKKKSFSKEELMSSDLEETAGSTSIPKRKKSTPKEETVNDPEEAGHRSGSKKKRKFSKEEPVSSGPEEAVGKSSSKKKKKFHKASQED

SEQ ID NO: 71 - protein, 2115 aa, Homo sapiens
MTLHATRGAALLSWVNSLHVADPVEAVLQLQDCSIFIKIIDRIHGTEEGQQILKQPVSERLDFVCSFLQKNRKHPSSPECLVSAQKVLEGSELELAKMTMLLLYHSTMSSKSPRDWEQFEYKIQAELAVILKFVLDHEDGLNLNEDLENFLQKAPVPSTCSSTFPEELSPPSHQAKREIRFLELQKVASSSSGNNFLSGSPASPMGDILQTPQFQMRRLKKQLADERSNRDELELELAENRKLLTEKDAQIAMMQQRIDRLALLNEKQAASPLEPKELEELRDKNESLTMRLHETLKQCQDLKTEKSQMDRKINQLSEENGDLSFKLREFASHLQQLQDALNELTEEHSKATQEWLEKQAQLEKELSAALQDKKCLEEKNEILQGKLSQLEEHLSQLQDNPPQEKGEVLGDVLQLETLKQEAATLAANNTQLQARVEMLETERGQQEAKLLAERGHFEEEKQQLSSLITDLQSSISNLSQAKEELEQASQAHGARLTAQVASLTSELTTLNATIQQQDQELAGLKQQAKEKQAQLAQTLQQQEQASQGLRHQVEQLSSSLKQKEQQLKEVAEKQEATRQDHAQQLATAAEEREASLRERDAALKQLEALEKEKAAKLEILQQQLQVANEARDSAQTSVTQAQREKAELSRKVEELQACVETARQEQHEAQAQVAELELQLRSEQQKATEKERVAQEKDQLQEQLQALKESLKVTKGSLEEEKRRAADALEEQQRCISELKAETRSLVEQHKRERKELEEERAGRKGLEARLQQLGEAHQAETEVLRRELAEAMAAQHTAESECEQLVKEVAAWRERYEDSQQEEAQYGAMFQEQLMTLKEECEKARQELQEAKEKVAGIESHSELQISRQQNELAELHANLARALQQVQEKEVRAQKLADDLSTLQEKMAATSKEVARLETLVRKAGEQQETASRELVKEPARAGDRQPEWLEEQQGRQFCSTQAALQAMEREAEQMGNELERLRAALMESQGQQQEERGQQEREVARLTQERGRAQADLALEKAARAELEMRLQNALNEQRVEFATLQEALAHALTEKEGKDQELAKLRGLEAAQIKELEELRQTVKQLKEQLAKKEKEHASGSGAQSEAAGRTEPTGPKLEALRAEVSKLEQQCQKQQEQADSLERSLEAERASRAERDSALETLQGQLEEKAQELGHSQSALASAQRELAAFRTKVQDHSKAEDEWKAQVARGRQEAERKNSLISSLEEEVSILNRQVLEKEGESKELKRLVMAESEKSQKLEERLRLLQAETASNSARAAERSSALREEVQSLREEAEKQRVASENLRQELTSQAERAEELGQELKAWQEKFFQKEQALSTLQLEHTSTQALVSELLPAKHLCQQLQAEQAAAEKRHREELEQSKQAAGGLRAELLRAQRELGELIPLRQKVAEQERTAQQLRAEKASYAEQLSMLKKAHGLLAEENRGLGERANLGRQFLEVELDQAREKYVQELAAVRADAETRLAEVQREAQSTARELEVMTAKYEGAKVKVLEERQRFQEERQKLTAQVEQLEVFQREQTKQVEELSKKLADSDQASKVQQQKLKAVQAQGGESQQEAQRLQAQLNELQAQLSQKEQAAEHYKLQMEKAKTHYDAKKQQNQELQEQLRSLEQLQKENKELRAEAERLGHELQQAGLKTKEAEQTCRHLTAQVRSLEAQVAHADQQLRDLGKFQVATDALKSREPQAKPQLDLSIDSLDLSCEEGTPLSITSKLPRTQPDGTSVPGEPASPISQRLPPKVESLESLYFTPIPARSQAPLESSLDSLGDVFLDSGRKTRSARRRTTQIINITMTKKLDVEEPDSANSSFYSTRSAPASQASLRATSSTQSLARLGSPDYGNSALLSLPGYRPTTRSSARRSQAGVSSGAPPGRNSFYMGTCQDEPEQLDDWNRIAELQQRNRVCPPHLKTCYPLESRPSLSLGTITDEEMKTGDPQETLRRASMQPIQIAEGTGITTRQQRKRVSLEPHQGPGTPESKKATSCFPRPMTPRDRHEGRKQSTTEAQKKAAPASTKQADRRQSMAFSILNTPKKLGNSLLRRGASKKALSKASPNTRSGTRRSPRIATTTASAATAAAIGATPRAKGKAKH

SEQ ID NO: 72 - protein, 2696 aa, Homo sapiens
MDQTCELPRRNCLLPFSNPVNLDAPEDKDSPFGNGQSNFSEPLNGCTMQLSTVSGTSQNAYGQDSPSCYIPLRRLQDLASMINVEYLNGSADGSESFQDPEKSDSRAQTPIVCTSLSPGGPTALAMKQEPSCNNSPELQVKVTKTIKNGFLHFENFTCVDDADVDSEMDPEQPVTEDESIEEIFEETQTNATCNYETKSENGVKVAMGSEQDSTPESRHGAVKSPFLPLAPQTETQKNKQRNEVDGSNEKAALLPAPFSLGDTNITIEEQLNSINLSFQDDPDSSTSTLGNMLELPGTSSSSTSQELPFCQPKKKSTPLKYEVGDLIWAKFKRRPWWPCRICSDPLINTHSKMKVSNRRPYRQYYVEAFGDPSERAWVAGKAIVMFEGRHQFEELPVLRRRGKQKEKGYRHKVPQKILSKWEASVGLAEQYDVPKGSKNRKCIPGSIKLDSEEDMPFEDCTNDPESEHDLLLNGCLKSLAFDSEHSADEKEKPCAKSRARKSSDNPKRTSVKKGHIQFEAHKDERRGKIPENLGLNFISGDISDTQASNELSRIANSLTGSNTAPGSFLFSSCGKNTAKKEFETSNGDSLLGLPEGALISKCSREKNKPQRSLVCGSKVKLCYIGAGDEEKRSDSISICTTSDDGSSDLDPIEHSSESDNSVLEIPDAFDRTENMLSMQKNEKIKYSRFAATNTRVKAKQKPLISNSHTDHLMGCTKSAEPGTETSQVNLSDLKASTLVHKPQSDFTNDALSPKFNLSSSISSENSLIKGGAANQALLHSKSKQPKFRSIKCKHKENPVMAEPPVINEECSLKCCSSDTKGSPLASISKSGKVDGLKLLNNMHEKTRDSSDIETAVVKHVLSELKELSYRSLGEDVSDSGTSKPSKPLLFSSASSQNHIPIEPDYKFSTLLMMLKDMHDSKTKEQRLMTAQNLVSYRSPGRGDCSTNSPVGVSKVLVSGGSTHNSEKKGDGTQNSANPSPSGGDSALSGELSASLPGLLSDKRDLPASGKSRSDCVTRRNCGRSKPSSKLRDAFSAQMVKNTVNRKALKTERKRKLNQLPSVTLDAVLQGDRERGGSLRGGAEDPSKEDPLQIMGHLTSEDGDHFSDVHFDSKVKQSDPGKISEKGLSFENGKGPELDSVMNSENDELNGVNQVVPKKRWQRLNQRRTKPRKRMNRFKEKENSECAFRVLLPSDPVQEGRDEFPEHRTPSASILEEPLTEQNHADCLDSAGPRLNVCDKSSASIGDMEKEPGIPSLTPQAELPEPAVRSEKKRLRKPSKWLLEYTEEYDQIFAPKKKQKKVQEQVHKVSSRCEEESLLARGRSSAQNKQVDENSLISTKEEPPVLEREAPFLEGPLAQSELGGGHAELPQLTLSVPVAPEVSPRPALESEELLVKTPGNYESKRQRKPTKKLLESNDLDPGFMPKKGDLGLSKKCYEAGHLENGITESCATSYSKDFGGGTTKIFDKPRKRKRQRHAAAKMQCKKVKNDDSSKEIPGSEGELMPHRTATSPKETVEEGVEHDPGMPASKKMQGERGGGAALKENVCQNCEKLGELLLCEAQCCGAFHLECLGLTEMPRGKFICNECRTGIHTCFVCKQSGEDVKRCLLPLCGKFYHEECVQKYPPTVMQNKGFRCSLHICITCHAANPANVSASKGRLMRCVRCPVAYHANDFCLAAGSKILASNSIICPNHFTPRRGCRNHEHVNVSWCFVCSEGGSLLCCDSCPAAFHRECLNIDIPEGNWYCNDCKAGKKPHYREIVWVKVGRYRWWPAEICHPRAVPSNIDKMRHDVGEFPVLFFGSNDYLWTHQARVFPYMEGDVSSKDKMGKGVDGTYKKALQEAAARFEELKAQKELRQLQEDRKNDKKPPPYKHIKVNRPIGRVQIFTADLSEIPRCNCKATDENPCGIDSECINRMLLYECHPTVCPAGGRCQNQCFSKRQYPEVEIFRTLQRGWGLRTKTDIKKGEFVNEYVGELIDEEECRARIRYAQEHDITNFYMLTLDKDRIIDAGPKGNYARFMNHCCQPNCETQKWSVNGDTRVGLFALSDIKAGTELTFNYNLECLGNGKTVCKCGAPNCSGFLGVRPKNQPIATEEKSKKFKKKQQGKRRTQGEITKEREDECFSCGDAGQLVSCKKPGCPKVYHADCLNLTKRPAGKWECPWHQCDICGKEAASFCEMCPSSFCKQHREGMLFISKLDGRLSCTEHDPCGPNPLEPGEIREYVPPPVPLPPGPSTHLAEQSTGMAAQAPKMSDKPPADTNQMLSLSKKALAGTCQRPLLPERPLERTDSRPQPLDKVRDLAGSGTKSQSLVSSQRPLDRPPAVAGPRPQLSDKPSPVTSPSSSPSVRSQPLERPLGTADPRLDKSIGAASPRPQSLEKTSVPTGLRLPPPDRLLITSSPKPQTSDRPTDKPHASLSQRLPPPEKVLSAVVQTLVAKEKALRPVDQNTQSKNRAALVMDLIDLTPRQKERAASPHQVTPQADEKMPVLESSSWPASKGLGHMPRAVEKGCVSDPLQTSGKAAAPSEDPWQAVKSLTQARLLSQPPAKAFLYEPTTQASGRASAGAEQTPGPLSQSPGLVKQAKQMVGGQQLPALAAKSGQSFRSLGKAPASLPTEEKKLVTTEQSPWALGKASSRAGLWPIVAGQTLAQSCWSAGSTQTLAQTCWSLGRGQDPKPEQNTLPALNQAPSSHKCAESEQK

SEQ ID NO: 73 - protein, 710 aa, Homo sapiens
MVKLAKAGKNQGDPKKMAPPPKEVEEDSEDEEMSEDEEDDSSGEEVVIPQKKGKKAAATSAKKVVVSPTKKVAVATPAKKAAVTPGKKAAATPAKKTVTPAKAVTTPGKKGATPGKALVATPGKKGAAIPAKGAKNGKNAKKEDSDEEEDDDSEEDEEDDEDEDEDEDEIEPAAMKAAAAAPASEDEDDEDDEDDEDDDDDEEDDSEEEAMETTPAKGKKAAKVVPVKAKNVAEDEDEEEDDEDEDDDDDEDDEDDDDEDDEEEEEEEEEEPVKEAPGKRKKEMAKQKAAPEAKKQKVEGTEPTTAFNLFVGNLNFNKSAPELKTGISDVFAKNDLAVVDVRIGMTRKFGYVDFESAEDLEKALELTGLKVFGNEIKLEKPKGKDSKKERDARTLLAKNLPYKVTQDELKEVFEDAAEIRLVSKDGKSKGIAYIEFKTEADAEKTFEEKQGTEIDGRSISLYYTGEKGQNQDYRGGKNSTWSGESKTLVLSNLSYSATEETLQEVFEKATFIKVPQNQNGKSKGYAFIEFASFEDAKEALNSCNKREIEGRAIRLELQGPRGSPNARSQPSKTLFVKGLSEDTTEETLKESFDGSVRARIVTDRETGSSKGFGFVDFNSEEDAKAAKEAMEDGEIDGNKVTLDWAKPKGEGGFGGRGGGRGGFGGRGGGRGGRGGFGGRGRGGFGGRGGFRGGRGGGGDHKPQGKKTKFE

SEQ ID NO: 74 - protein, 189 aa, Homo sapiens
MASKRALVILAKGAEEMETVIPVDVMRRAGIKVTVAGLAGKDPVQCSRDVVICPDASLEDAKKEGPYDVVVLPGGNLGAQNLSESAAVKEILKEQENRKGLIAAICAGPTALLAHEIGFGSKVTTHPLAKDKMMNGGHYTYSENRVEKDGLILTSRGPGTSFEFALAIVEALNGKEVAAQVKAPLVLKD

SEQ ID NO: 75 - protein, 216 aa, Homo sapiens
MLRLSERNMKVLLAAALIAGSVFFLLLPGPSAADEKKKGPKVTVKVYFDLRIGDEDVGRVIFGLFGKTVPKTVDNFVALATGEKGFGYKNSKFHRVIKDFMIQGGDFTRGDGTGGKSIYGERFPDENFKLKHYGPGWVSMANAGKDTNGSQFFITTVKTAWLDGKHVVFGKVLEGMEVVRKVESTKTDSRDKPLKDVIIADCGKIEVEKPFAIAKE

SEQ ID NO: 76 - protein, 836 aa, Homo sapiens
MIPFLPMFSLLLLLIVNPINANNHYDKILAHSRIRGRDQGPNVCALQQILGTKKKYFSTCKNWYKKSICGQKTTVLYECCPGYMRMEGMKGCPAVLPIDHVYGTLGIVGATTTQRYSDASKLREEIEGKGSFTYFAPSNEAWDNLDSDIRRGLESNVNVELLNALHSHMINKRMLTKDLKNGMIIPSMYNNLGLFINHYPNGVVTVNCARIIHGNQIATNGVVHVIDRVLTQIGTSIQDFIEAEDDLSSFRAAAITSDILEALGRDGHFTLFAPTNEAFEKLPRGVLERIMGDKVASEALMKYHILNTLQCSESIMGGAVFETLEGNTIEIGCDGDSITVNGIKMVNKKDIVTNNGVIHLIDQVLIPDSAKQVIELAGKQQTTFTDLVAQLGLASALRPDGEYTLLAPVNNAFSDDTLSMDQRLLKLILQNHILKVKVGLNELYNGQILETIGGKQLRVFVYRTAVCIENSCMEKGSKQGRNGAIHIFREIIKPAEKSLHEKLKQDKRFSTFLSLLEAADLKELLTQPGDWTLFVPTNDAFKGMTSEEKEILIRDKNALQNIILYHLTPGVFIGKGFEPGVTNILKTTQGSKIFLKEVNDTLLVNELKSKESDIMTTNGVIHVVDKLLYPADTPVGNDQLLEILNKLIKYIQIKFVRGSTFKEIPVTVYTTKIITKVVEPKIKVIEGSLQPIIKTEGPTLTKVKIEGEPEFRLIKEGETITEVIHGEPIIKKYTKIIDGVPVEITEKETREERIITGPEIKYTRISTGGGETEETLKKLLQEEVTKVTKFIEGGDGHLFEDEEIKRLLQGDTPVRKLQANKKVQGSRRRLREGRSQ

SEQ ID NO: 77 - protein, 2346 aa, Homo sapiens
MSNGYRTLSQHLNDLKKENFSLKLRIYFLEERMQQKYEASREDIYKRNIELKVEVESLKRELQDKKQHLDKTWADVENLNSQNEAELRRQFEERQQETEHVYELLENKIQLLQEESRLAKNEAARMAALVEAEKECNLELSEKLKGVTKNWEDVPGDQVKPDQYTEALAQRDKRIEELNQSLAAQERLVEQLSREKQQLLHLLEEPTSMEVQPMTEELLKQQKLNSHETTITQQSVSDSHLAELQEKIQQTEATNKILQEKLNEMSYELKCAQESSQKQDGTIQNLKETLKSRERETEELYQVIEGQNDTMAKLREMLHQSQLGQLHSSEGTSPAQQQVALLDLQSALFCSQLEIQKLQRVVRQKERQLADAKQCVQFVEAAAHESEQQKEASWKHNQELRKALQQLQEELQNKSQQLRAWEAEKYNEIRTQEQNIQHLNHSLSHKEQLLQEFRELLQYRDNSDKTLEANEMLLEKLRQRIHDKAVALERAIDEKFSALEEKEKELRQLRLAVRERDHDLERLRDVLSSNEATMQSMESLLRAKGLEVEQLSTTCQNLQWLKEEMETKFSRWQKEQESIIQQLQTSLHDRNKEVEDLSATLLCKLGPGQSEIAEELCQRLQRKERMLQDLLSDRNKQVLEHEMEIQGLLQSVSTREQESQAAAEKLVQALMERNSELQALRQYLGGRDSLMSQAPISNQQAEVTPTGCLGKQTDQGSMQIPSRDDSTSLTAKEDVSIPRSTLGDLDTVAGLEKELSNAKEELELMAKKERESQMELSALQSMMAVQEEELQVQAADMESLTRNIQIKEDLIKDLQMQLVDPEDIPAMERLTQEVLLLREKVASVESQGQEISGNRRQQLLLMLEGLVDERSRLNEALQAERQLYSSLVKFHAHPESSERDRTLQVELEGAQVLRSRLEEVLGRSLERLNRLETLAAIGGAAAGDDTEDTSTEFTDSIEEEAAHHSHQQLVKVALEKSLATVETQNPSFSPPSPMGGDSNRCLQEEMLHLRAEFHQHLEEKRKAEEELKELKAQIEEAGFSSVSHIRNTMLSLCLENAELKEQMGEAMSDGWEIEEDKEKGEVMVETVVTKEGLSESSLQAEFRKLQGKLKNAHNIINLLKEQLVLSSKEGNSKLTPELLVHLTSTIERINTELVGSPGKHQHQEEGNVTVRPFPRPQSLDLGATFTVDAHQLDNQSQPRDPGPQSAFSLPGSTQHLRSQLSQCKQRYQDLQEKLLLSEATVFAQANELEKYRVMLTGESLVKQDSKQIQVDLQDLGYETCGRSENEAEREETTSPECEEHNSLKEMVLMEGLCSEQGRRGSTLASSSERKPLENQLGKQEEFRVYGKSENILVLRKDIKDLKAQLQNANKVIQNLKSRVRSLSVTSDYSSSLERPWKLRAVGTLEGSSPHSVPDEDEGWLSDGTGAFYSPGLQAKKDLESLIQRVSQLEAQLPKNGLEEKLAEELRSASWPGKYDSLIQDQARELSYLRQKIREGRGICYLITRHAKDTVKSFEDLLRSNDIDYYLGQSFREQLAQGSQLTERLTSKLSTKDHKSEKDQAGLEPLALRLSRELQEKEKVIEVLQAKLDARSLTPSSSHALSDSHRSPSSTSFLSDELEACSDMDIVSEYTHYEEKKASPSHSDSIHHSSHSAVLSSKPSSTSASQGAKAESNSNPISLPTPQNTPKEANQAHSGFHFHSIPKLASLPQAPLPSAPSSFLPFSPTGPLLLGCCETPVVSLAEAQQELQMLQKQLGESASTVPPASTATLLSNDLEADSSYYLNSAQPHSPPRGTIELGRILEPGYLGSSGKWDVMRPQKGSVSGDLSSGSSVYQLNSKPTGADLLEEHLGEIRNLRQRLEESICINDRLREQLEHRLTSTARGRGSTSNFYSQGLESIPQLCNENRVLREDNRRLQAQLSHVSREHSQETESLREALLSSRSHLQELEKELEHQKVERQQLLEDLREKQQEVLHFREERLSLQENDSRLQHKLVLLQQQCEEKQQLFESLQSELQIYEALYGNSKKGLKAYSLDACHQIPLSSDLSHLVAEVRALRGQLEQSIQGNNCLRLQLQQQLESGAGKASLSPSSINQNFPASTDPGNKQLLLQDSAVSPPVRDVGMNSPALVFPSSASSTPGSETPIINRANGLGLDTSPVMKTPPKLEGDATDGSFANKHGRHVIGHIDDYSALRQQIAEGKLLVKKIVSLVRSACSFPGLEAQGTEVLGSKGIHELRSSTSALHHALEESASLLTMFWRAALPSTHIPVLPGKVGESTERELLELRTKVSKQERLLQSTTEHLKNANQQKESMEQFIVSQLTRTHDVLKKARTNLEVKSLRALPCTPAL

SEQ ID NO: 78 - protein, 299 aa, Homo sapiens
MAQNLKDLAGRLPAGPRGMGTALKLLLGAGAVAYGVRESVFTVEGGHRAIFFNRIGGVQQDTILAEGLHFRIPWFQYPIIYDIRARPRKISSPTGSKDLQMVNISLRVLSRPNAQELPSMYQRLGLDYEERVLPSIVNEVLKSVVAKFNASQLITQRAQVSLLIRRELTERAKDFSLILDDVAITELSFSREYTAAVEAKQVAQQEAQRAQFLVEKAKQEQRQKIVQAEGEAEAAKMLGEALSKNPGYIKLRKIRAAQNISKTIATSQNRIYLTADNLVLNLQDESFTRGSDSLIKGKK

SEQ ID NO: 79 - protein, 394 aa, Homo sapiens
MSGEDEQQEQTIAEDLVVTKYKMGGDIANRVLRSLVEASSSGVSVLSLCEKGDAMIMEETGKIFKKEKEMKKGIAFPTSISVNNCVCHFSPLKSDQDYILKEGDLVKIDLGVHVDGFIANVAHTFVVDVAQGTQVTGRKADVIKAAHLCAEAALRLVKPGNQNTQVTEAWNKVAHSFNCTPIEGMLSHQLKQHVIDGEKTIIQNPTDQQKKDHEKAEFEVHEVYAVDVLVSSGEGKAKDAGQRTTIYKRDPSKQYGLKMKTSRAFFSEVERRFDAMPFTLRAFEDEKKARMGVVECAKHELLQPFNVLYEKEGEFVAQFKFTVLLMPNGPMRITSGPFEPDLYKSEMEVQDAELKALLQSSASRKTQKKKKKKASKTAENATSGETLEENEAGD

SEQ ID NO: 80 - protein, 329 aa, Homo sapiens
MVRTKTWTLKKHFVGYPTNSDFELKTAELPPLKNGEVLLEALFLTVDPYMRVAAKRLKEGDTMMGQQVAKVVESKNVALPKGTIVLASPGWTTHSISDGKDLEKLLTEWPDTIPLSLALGTVGMPGLTAYFGLLEICGVKGGETVMVNAAAGAVGSVVGQIAKLKGCKVVGAVGSDEKVAYLQKLGFDVVFNYKTVESLEETLKKASPDGYDCYFDNVGGEFSNTVIGQMKKFGRIAICGAISTYNRTGPLPPGPPPEIVIYQELRMEAFVVYRWQGDARQKALKDLLKWVLEGKIQYKEYIIEGFENMPAAFMGMLKGDNLGKTIVKA

SEQ ID NO: 81 - protein, 504 aa, Homo sapiens
MAAQALALLREVARLEAPLEELRALHSVLQAVPLNELRQQAAELRLGPLFSLLNENHREKTTLCVSILERLLQAMEPVHVARNLRVDLQRGLIHPDDSVKILTLSQIGRIVENSDAVTEILNNAELLKQIVYCIGGENLSVAKAAIKSLSRISLTQAGLEALFESNLLDDLKSVMKTNDIVRYRVYELIIEISSVSPESLNYCTTSGLVTQLLRELTGEDVLVRATCIEMVTSLAYTHHGRQYLAQEGVIDQISNIIVGADSDPFSSFYLPGFVKFFGNLAVMDSPQQICERYPIFVEKVFEMIESQDPTMIGVAVDTVGILGSNVEGKQVLQKTGTRFERLLMRIGHQSKNAPVELKIRCLDAISSLLYLPPEQQTDDLLRMTESWFSSLSRDPLELFRGISSQPFPELHCAALKVFTAIANQPWAQKLMFNSPGFVEYVVDRSVEHDKASKDAKYELVKALANSKTIAEIFGNPNYLRLRTYLSEGPYYVKPVSTTAVEGAE

SEQ ID NO: 82 - protein, 205 aa, Homo sapiens
MSIMSYNGGAVMAMKGKNCVAIAADRRFGIQAQMVTTDFQKIFPMGDRLYIGLAGLATDVQTVAQRLKFRLNLYELKEGRQIKPYTLMSMVANLLYEKRFGPYYTEPVIAGLDPKTFKPFICSLDLIGCPMVTDDFVVSGTCAEQMYGMCESLWEPNMDPDHLFETISQAMLNAVDRDAVSGMGVIVHIIEKDKITTRTLKARMD

SEQ ID NO: 83 - protein, 505 aa, Homo sapiens
MRLRRLALFPGVALLLAAARLAAASDVLELTDDNFESRISDTGSAGLMLVEFFAPWCGHCKRLAPEYEAAATRLKGIVPLAKVDCTANTNTCNKYGVSGYPTLKIFRDGEEAGAYDGPRTADGIVSHLKKQAGPASVPLRTEEEFKKFISDKDASIVGFFDDSFSEAHSEFLKAASNLRDNYRFAHTNVESLVNEYDDNGEGIILFRPSHLTNKFEDKTVAYTEQKMTSGKIKKFIQENIFGICPHMTEDNKDLIQGKDLLIAYYDVDYEKNAKGSNYWRNRVMMVAKKFLDAGHKLNFAVASRKTFSHELSDFGLESTAGEIPVVAIRTAKGEKFVMQEEFSRDGKALERFLQDYFDGNLKRYLKSEPIPESNDGPVKVVVAENFDEIVNNENKDVLIEFYAPWCGHCKNLEPKYKELGEKLSKDPNIVIAKMDATANDVPSPYEVRGFPTIYFSPANKKLNPKKYEGGRELSDFISYLQREATNPPVIQEEKPKKKKKAQEDL

SEQ ID NO: 84 - protein, 531 aa, Homo sapiens
MSKPHSEAGTAFIQTQQLHAAMADTFLEHMCRLDIDSPPITARNTGIICTIGPASRSVETLKEMIKSGMNVARLNFSHGTHEYHAETIKNVRTATESFASDPILYRPVAVALDTKGPEIRTGLIKGSGTAEVELKKGATLKITLDNAYMEKCDENILWLDYKNICKVVEVGSKIYVDDGLISLQVKQKGADFLVTEVENGGSLGSKKGVNLPGAAVDLPAVSEKDIQDLKFGVEQDVDMVFASFIRKASDVHEVRKVLGEKGKNIKIISKIENHEGVRRFDEILEASDGIMVARGDLGIEIPAEKVFLAQKMMIGRCNRAGKPVICATQMLESMIKKPRPTRAEGSDVANAVLDGADCIMLSGETAKGDYPLEAVRMQHLIAREAEAAIYHLQLFEELRRLAPITSDPTEATAVGAVEASFKCCSGAIIVLTKSGRSAHQVARYRPRAPIIAVTRNPQTARQAHLYRGIFPVLCKDPVQEAWAEDVDLRVNFAMNVGKARGFFKKGDVVIVLTGWRPGSGFTNTMRVVPVP

SEQ ID NO: 85 - protein, 201 aa, Homo sapiens
MTEKAPEPHVEEDDDDELDSKLNYKPPPQKSLKELQEMDKDDESLIKYKKTLLGDGPVVTDPKAPNVVVTRLTLVCESAPGPITMDLTGDLEALKKETIVLKEGSEYRVKIHFKVNRDIVSGLKYVQHTYRTGVKVDKATFMVGSYGPRPEEYEFLTPVEEAPKGMLARGTYHNKSFFTDDDKQDHLSWEWNLSIKKEWTE

SEQ ID NO: 86 - protein, 311 aa, Homo sapiens
MQRPGPFSTLYGRVLAPLPGRAGGAASGGGGNSWDLPGSHVRLPGRAQSGTRGGAGNTSTSCGDSNSICPAPSTMSKAEEAKKLAGRAAVENHVRNNQVLGIGSGSTIVHAVQRIAERVKQENLNLVCIPTSFQARQLILQYGLTLSDLDRHPEIDLAIDGADEVDADLNLIKGGGGCLTQEKIVAGYASRFIVIADFRKDSKNLGDQWHKGIPIEVIPMAYVPVSRAVSQKFGGVVELRMAVNKAGPVVTDNGNFILDWKFDRVHKWSEVNTAIKMIPGVVDTGLFINMAERVYFGMQDGSVNMREKPFC

SEQ ID NO: 87 - protein, 427 aa, Homo sapiens [sequence omitted]

SEQ ID NO: 88 - protein, 146 aa, Homo sapiens [sequence omitted]

SEQ ID NO: 89 - protein, 145 aa, Homo sapiens [sequence omitted]

SEQ ID NO: 90 - protein, 293 aa, Homo sapiens [sequence omitted]

SEQ ID NO: 91 - protein, 307 aa, Homo sapiens
MPRSFLVKKIKGDGFQCSGVPAPTYHPLETAYVLPGARGPPGDNGYAPHRLPPSSYDADQKPGLELAPAEPAYPPAAPEEYSDPESPQSSLSARYFRGEAAVTDSYSMDAFFISDGRSRRRRGGGGGDAGGSGDAGGAGGRAGRAGAQAGGGHRHACAECGKTYATSSNLSRHKQTHRSLDSQLARKCPTCGKAYVSMPALAMHLLTHNLRHKCGVCGKAFSRPWLLQGHMRSHTGEKPFGCAHCGKAFADRSNLRAHMQTHSAFKHYRCRQCDKSFALKSYLHKHCEAACAKAAEPPPPTPAGPAS

SEQ ID NO: 92 - protein, 215 aa, Homo sapiens
MVLLTMIARVADGLPLAASMQEDEQSGRDLQQYQSQAKQLFRKLNEQSPTRCTLEAGAMTFHYIIEQGVCYLVLCEAAFPKKLAFAYLEDLHSEFDEQHGKKVPTVSRPYSFIEFDTFIQKTKKLYIDSRARRNLGSINTELQDVQRIMVANIEEVLQRGEALSALDSKANNLSSLSKKYRQDAKYLNMRSTYAKLAAVAVFFIMLIVYVRFWWL

SEQ ID NO: 93 - protein, 349 aa, Homo sapiens
MRLEWGPRPAALPWPAGMCAAERAEGAFTLQSVAQPMRPIASTATKCGNCGPGYSTPLEAMKGPREEIVYLPCIYRNTGTEAPDYLATVDVDPKSPQYCQVIHRLPMPNLKDELHHSGWNTCSSCFGDSTKSRTKLVLPSLISSRIYVVDVGSEPRAPKLHKVIEPKDIHAKCELAFLHTSHCLASGEVMISSLGDVKGNGKGGFVLLDGETFEVKGTWERPGGAAPLGYDFWYQPRHNVMISTEWAAPNVLRDGFNPADVEAGLYGSHLYVWDWQRHEIVQTLSLKDGLIPLEIRFLHNPDAAQGFVGCALSSTIQRFYKNEGGTWSVEKVIQVPPKKVKGWLLPEMP

SEQ ID NO: 94 - protein, 361 aa, Homo sapiens
MSKQQPTQFINPETPGYVGFANLPNQVHRKSVKKGFEFTLMVVGESGLGKSTLINSLFLTDLYPERVIPGAAEKIERTVQIEASTVEIEERGVKLRLTVVDTPGYGDAINCRDCFKTIISYIDEQFERYLHDESGLNRRHIIDNRVHCCFYFISPFGHGLKPLDVAFMKAIHNKVNIVPVIAKADTLTLKERERLKKRILDEIEEHNIKIYHLPDAESDEDEDFKEQTRLLKASIPFSVVGSNQLIEAKGKKVRGRLYPWGVVEVENPEHNDFLKLRTMLITHMQDLQEVTQDLHYENFRSERLKRGGRKVENEDMNKDQILLEKEAELRRMQEMIARMQAQMQMQMQGGDGDGGALGHHV

SEQ ID NO: 95 - protein, 114 aa, Homo sapiens
MVIRVYIASSSGSTAIKKKQQDVLGFLEANKIGFEEKDIAANEENRKWMRENVPENSRPATGYPLPPQIFNESQYRGDYDAFFEARENNAVYAFLGLTAPPGSKEAEVQAKQQA

SEQ ID NO: 96 - protein, 6885 aa, Homo sapiens
MASSPELPTEDEQGSWGIDDLHISLQAEQEDTQKKAFTCWINSQLARHTSPSVISDLFTDIKKGHVLLDLLEVLSGQQLPRDKGSNTFQCRINIEHALTFLRNRSIKLINIHVTDIIDGNPSIILGLIWTIILHFHIEKLAQTLSCNYNQPSLDDVSVVDSSPASSPPAKKCSKVQARWQMSARKALLLWAQEQCATYESVNVTDFKSSWRNGMAFLAIIHALRPDLIDMKSVKHRSNKDNLREAFRIAEQELKIPRLLEPEDVDVVDPDEKSIMTYVAQFLQYSKDAPGTGEEAQGKVKDAMGWLTLQKEKLQKLLKDSENDTYFKKYNSLLSFMESFNEEKKSFLDVLSIKRDLDELDKDHLQLREAWDGLDHQINAWKIKLNYALPPPLHQTEAWLQEVEELMDEDLSASQDHSQAVTLIQEKMTLFKSLMDRFEHHSNILLTFENKDENHLPLVPPNKLEEMKRRINNILEKKFILLLEFHYYKCLVLGLVDEVKSKLDIWNIKYGSRESVELLLEDWHKFIEEKEFLARLDTSFQKCGEIYKNLAGECQNINKQYMMVKSDVCMYRKNIYNVKSTLQKVLACWATYVENLRLLRACFEETKKEEIKEVPFETLAQWNLEHATLNEAGNFLVEVSNDVVGSSISKELRRLNKRWRKLVSKTQLEMNLPLMIKKQDQPTFDNSGNILSKEEKATVEFSTDMSVELPENYNQNIKAGEKHEKENEEFTGQLKVAKDVEKLIGQVEIWEAEAKSVLDQDDVDTSMEESLKHLIAKGSMFDELMARSEDMLQMDIQNISSQESFQHVLTTGLQAKIQEAKEKVQINVVKLIAALKNLTDVSPDLDIRLKMEESQKELESYMMRAQQLLGQRESPGELISKHKEALIISNTKSLAKYLKAVEELKNNVTEDIKMSLEEKSRDVCAKWESLHHELSLYVQQLKIDIEKGKLSDNILKLEKQINKEKKLIRRGRTKGLIKEHEACFSEEGCLYQLNHHMEVLRELCEELPSQKSQQEVKRLLKDYEQKIERLLKCASEIHMTLQPTAGGTSKNEGTITTSENRGGDPHSEAPFAKSDNQPSTEKAMEPTMKFSLASVLRPLQEESIMEKDYSASINSLLERYDTYRDILEHHLQNNKFRITSDFSSEEDRSSSCLQAKLTDLQVIKNETDARWKEFEIISLKLENHVNDIKKPFVIKERDTLKERERELQMTLNTRMESLETALRLVLPVEKASLLLCGSDLPLHKMAIQGFHLIDADRIYQHLRNIQDSIAKQIEICNRLEEPGNFVLKELHPFDLHAMQNIILKYKTQFEGMNHRVQRSEDTLKALEDFLASLRTAKLSAEPVTDLSASDTQVAQENTLTVKNKEGEIHLMKDKAKHLDKCLKMLDMSFKDAERGDDTSCENLLDAFSIKLSETHGYGVQEEFTEENKLLEACIFKNNELLKNIQDVQSQISKIGLKDPTVPAVKHRKKSLIRLDKVLDEYEEEKRHLQEMANSLPHFKDGREKTVNQQCQNTVVLWENTKALVTECLEQCGRVLELLKQYQNFKSILTTLIQKEESVISLQASYMGKENLKKRIAEIEIVKEEFNEHLEVVDKINQVCKNLQFYLNKMKTFEEPPFEKEANIIVDRWLDINEKTEDYYENLGRALALWDKLFNLKNVIDEWTEKALQKMELHQLTEEDRERLKEELQVHEQKTSEFSRRVAEIQFLLQSSEIPLELQVMESSILNKMEHVQKCLTGESNCHALSGSTAELREDLDQAKTQIGMTESLLKALSPSDSLEIFTKLEEIQQQILQQKHSMILLENQIGCLTPELSELKKQYESVSDLFNTKKSVLQDHFSKLLNDQCKNFNDWFSNIKVNLKECFESSETKKSVEQKLQKLSDFLTLEGRNSKIKQVDSVLKHVKKHLPKAHVKELISWLVGQEFELEKMESICQARAKELEDSLQQLLRLQDDHRNLRKWLTNQEEKWKGMEEPGEKTELFCQALARKREQFESVAQLNNSLKEYGFTEEEEIIMEATCLMDRYQTLLRQLSEIEEEDKLLPTEDQSFNDLAHDVIHWIKEIKESLMVLNSSEGKMPLEERIQKIKEIILLKPEGDARIETIMKQAESSEAPLVQKTLTDISNQWDNTLHLASTYLSHQEKLLLEGEKYLQSKEDLRLMLIELKKKQEAGFALQHGLQEKKAQLKIYKKFLKKAQDLTSLLKELKSQGNYLLECTKNPSFSEEPWLEIKHLHESLLQQLQDSVQNLDGHVREHDSYQVCVTDLNTTLDNFSKEFVSFSDKPVDQIAVEEKLQKLQELENRLSLQDGTLKKILALAKSVKQNTSSVGQKIIKDDIKSLQCKQKDLENRLASAKQEMECCLNSILKSKRSTEKKGKFTLPGREKQATSDVQESTQESAAVEKLEEDWEINKDSAVEMAMSKQLSLNAQESMKNTEDERKVNELQNQPLELDTMLRNEQLEEIEKLYTQLEAKKAAIKPLEQTECLNKTETGALVLHNIGYSAQHLDNLLQALITLKKNKESQYCVLRDFQEYLAAVESSMKALLTDKESLKVGPLDSVTYLDKIKKFIASIEKEKDSLGNLKIKWENLSNHVTDMDKKLLESQIKQLEHGWEQVEQQIQKKYSQQVVEYDEFTTLMNKVQDTEISLQQQQQHLQLRLKSPEERAGNQSMIALTTDLQATKHGFSVLKGQAELQMKRIWGEKEKKNLEDGINNLKKQWETLEPLHLEAENQIKKCDIRNKMKETILWAKNLLGELNPSIPLLPDDILSQIRKCKVTHDGILARQQSVESLAEEVKDKVPSLTTYEGSDLNNTLEDLRNQYQMLVLKSTQRSQQLEFKLEERSNFFAIIRKFQLMVQESETLIIPRVETAATEAELKHHHVTLEASQKELQEIDSGISTHLQELTNIYEELNVFERLFLEDQLKNLKIRTNRIQRFIQNTCNEVEHKIKFCRQFHEKTSALQEEADSIQRNELLLNQEVNKGVKEEIYNLKDRLTAIKCCILQVLKLKKVFDYIGLNWDFSQLDQLQTQVFEKEKELEEKIKQLDTFEEEHGKYQALLSKMRAIDLQIKKMTEVVLKAPDSSPESRRLNAQILSQRIEKAKCLCDEIIKKLNENKTFDDSFKEKEILQIKLNAEENDKLYKVLQNMVLELSPKELDEKNCQDKLETSLHVLNQIKSQLQQPLLINLEIKHIQNEKDNCEAFQEQVWAEMCSIKAVTAIEKQREENSSEASDVETKLREFEDLQMQLNTSIDLRTNVLNDAYENLTRYKEAVTRAVESITSLEAIIIPYRVDVGNPEESLEMPLRKQEELESTVAHIQDLTEKLGMISSPEAKLQLQYTLQELVSKNSAMKEAFKAQETEAERYLENYKCYRKMEEDIYTNLSKMETVLGQSMSSLPLSYREALERLEQSKALVSNLISTKEELMKLRQILRLLRLRCTENDGICLLKIVSALWEKWLSLLEAAKEWEMWCEELKQEWKFVSEEIEREAIILDNLQEELPEISKTKEAATTEELSELLDCLCQYGENVEKQQLLLTLLLQRIRSIQNVPESSGAVETVPAFQEITSMKERCNKLLQKVQKNKELVQTEIQERHSFTKEIIALKNFFQQTTTSFQNMAFQDHPEKSEQFEELQSILKKGKLTFENIMEKLRIKYSEMYTIVPAEIESQVEECRKALEDIDEKISNEVLKSSPSYAMRRKIEEINNGLHNVEKMLQQKSKNIEKAQEIQKKMWDELDLWHSKLNELDSEVQDIVEQDPGQAQEWMDNLMIPFQQYQQVSQRAECRTSQLNKATVKMEEYSDLLKSTEAWIENTSHLLANPADYDSLRTLSHHASTVQMALEDSEQKHNLLHSIFMDLEDLSIIFETDELTQSIQELSNQVTALQQKIMESLPQIQRMADDVVAIESEVKSMEKRVSKIKTILLSKEIFDFSPEEHLKHGEVILENIRPMKKTIAEIVSYQVELRLPQTGMKPLPVFQRTNQLLQDIKLLENVTQEQNELLKVVIKQTNEWDEEIENLKQILNNYSAQFSLEHMSPDQADKLPQLQGEIERMEKQILSLNQRKEDLLVDLKATVLNLHQHLKQEQEGVERDRLPAVTSEEGGVAERDASERKLNRRGSMSYLAAVEEEVEESSVKSDNGDEKAEPSPQSWSSLWKHDKDMEEDRASSSSGTIVQEAYGKISTSDNSMAQILTPDSLNTEQGPECSLRPNQTEEGTTPPIEADTLDSSDAQGGLEPRVEKTRPEPTEVLHACKTQVAELELWLQQANVAVEPETLNADMQQVLEQQLVGCQAMLTEIEHKVAFLLETCKDQGLGDNGATQHEAEALSLKLKTVKCNLEKVQMMLQEKHSEDQHPTILKKSSEPEHQEALQPVNLSELESIVTERPQFSRQKDFQQQQVLELKPMEQKDFIKFIEFNAKKMWPQYCQHDNDTTQESSASNQASSPENDVPDSILSPQGQNGDKWQYLHHELSSKIKLPLPQLVEPQVSTNMGILPSVTMYNFRYPTTEELKTYTTQLEDLRQEASNLQTQENMTEEAYINLDKKLFELFLTLSQCLSSVEEMLEMPRLYREDGSGQQVHYETLALELKKLYLALSDKKGDLLKAMTWPGENTNLLLECFDNLQVCLEHTQAAAVCRSKSLKAGLDYNRSYQNEIKRLYHQLIKSKTSLQQSLNEISGQSVAEQLQKADAYTVELENAESRVAKLRDEGERLHLPYALLQEVYKLEDVLDSMWGMLRARYTELSSPFVTESQQDALLQGMVELVKIGKEKLAHGHLKQTKSKVALQAQIENHKVFFQKLVADMLLIQAYSAKILPSLLQNRETFWAEQVTEVKILEEKSRQCGMKLQSLLQKWEEFDENYASLEKDLEILISTLPSVSLVEETEERLVERISFYQQIKRNIGGKHARLYQTLNEGKQLVASVSCPELEGQIAKLEEQWLSLNKKIDHELHRLQALLKHLLSYNRDSDQLTKWLESSQHTLNYWKEQSLNVSQDLDTIRSNINNFFEFSKEVDEKSSLKTAVISIGNQLLHLKETDTATLRASLAQFEQKWTMLITQLPDIQEKLHQLQMEKLPSRKAITEMISWMNNVEHQTSDEDSVHSPSSASQVKHLLQKHKEFRMEMDYKQWIVDFVNQSLLQLSTCDVESKRYERTEFAEHLGEMNRQWHRVHGMLNRKIQHLEQLLESITESENKIQILNNWLEAQEERLKTLQKPESVISVQKLLLDCQDIENQLAIKSKALDELKQSYLTLESGAVPLLEDTASRIDELFQKRSSVLTQVNQLKTSMQSVLQEWKIYDQLYDEVNMMTIRFWYCMEHSKPVVLSLETLRCQVENLQSLQDEAESSEGSWEKLQEVIGKLKGLCPSVAEIIEEKCQNTHKRWTQVNQAIADQLQKAQSLLQLWKAYSNAHGEAAARLKQQEAKFQQLANISMSGNNLAEILPPALQDIKELQHDVQKTKEAFLQNSSVLDRLPQPAESSTHMLLPGPLHSLQRAAYLEKMLLVKANEFEFVLSQFKDFGVRLESLKGLIMHEEENLDRLHQQEKENPDSFLNHVLALTAQSPDIEHLNEVSLKLPLSDVAVKTLQNMNRQWIRATATALERCSELQGIGLNEKFLYCCEKWIQLLEKIEEALKVDVANSLPELLEQQKTYKMLEAEVSINQTIADSYVTQSLQLLDTTEIENRPEFITEFSKLTDRWQNAVQGVRQRKGDVDGLVRQWQDFTTSVENLFRFLTDTSHLLSAVKGQERFSLYQTRSLIHELKNKEIHFQRRRTTCALTLEAGEKLLLTTDLKTKESVGRRISQLQDSWKDMEPQLAEMIKQFQSTVETWDQCEKKIKELKSRLQVLKAQSEDPLPELHEDLHNEKELIKELEQSLASWTQNLKELQTMKADLTRHVLVEDVMVLKEQIEHLHRQWEDLCLRVAIRKQEIEDRLNTWVVFNEKNKELCAWLVQMENKVLQTADISIEEMIEKLQKDCMEEINLFSENKLQLKQMGDQLIKASNKSRAAEIDDKLNKINDRWQHLFDVIGSRVKKLKETFAFIQQLDKNMSNLRTWLARIESELSKPVVYDVCDDQEIQKRLAEQQDLQRDIEQHSAGVESVFNICDVLLHDSDACANETECDSIQQTTRSLDRRWRNICAMSMERRMKIEETWRLWQKFLDDYSRFEDWLKSAERTAACPNSSEVLYTSAKEELKRFEAFQRQIHERLTQLELINKQYRRLARENRTDTASRLKQMVHEGNQRWDNLQRRVTAVLRRLRHFTNQREEFEGTRESILVWLTEMDLQLTNVEHFSESDADDKMRQLNGFQQEITLNTNKIDQLIVFGEQLIQKSEPLDAVLIEDELEELHRYCQEVFGRVSRFHRRLTSCTPGLEDEKEASENETDMEDPREIQTDSWRKRGESEEPSSPQSLCHLVAPGHERSGCETPVSVDSIPLEWDHTGDVGGSSSHEEDEEGPYYSALSGKSISDGHSWHVPDSPSCPEHHYKQMEGDRNVPPVPPASSTPYKPPYGKLLLPPGTDGGKEGPRVLNGNPQQEDGGLAGITEQQSGAFDRWEMIQAQELHNKLKIKQNLQQLNSDISAITTWLKKTEAELEMLKMAKPPSDIQEIELRVKRLQEILKAFDTYKALVVSVNVSSKEFLQTESPESTELQSRLRQLSLLWEAAQGAVDSWRGGLRQSLMQCQDFHQLSQNLLLWLASAKNRRQKAHVTDPKADPRALLECRRELMQLEKELVERQPQVDMLQEISNSLLIKGHGEDCIEAEEKVHVIEKKLKQLREQVSQDLMALQGTQNPASPLPSFDEVDSGDQPPATSVPAPRAKQFRAVRTTEGEEETESRVPGSTRPQRSFLSRVVRAALPLQLLLLLLLLLACLLPSSEEDYSCTQANNFARSFYPMLRYTNGPPPT

SEQ ID NO: 97 - protein, 2364 aa, Homo sapiens
MTTTVATDYDNIEIQQQYSDVNNRWDVDDWDNENSSARLFERSRIKALADEREAVQKKTFTKWVNSHLARVSCRITDLYTDLRDGRMLIKLLEVLSGERLPKPTKGRMRIHCLENVDKALQFLKEQRVHLENMGSHDIVDGNHRLTLGLIWTIILRFQIQDISVETEDNKEKKSAKDALLLWCQMKTAGYPNVNIHNFTTSWRDGMAFNALIHKHRPDLIDFDKLKKSNAHYNLQNAFNLAEQHLGLTKLLDPEDISVDHPDEKSIITYVVTYYHYFSKMKALAVEGKRIGKVLDNAIETEKMIEKYESLASDLLEWIEQTIIILNNRKFANSLVGVQQQLQAFNTYRTVEKPPKFTEKGNLEVLLFTIQSKMRANNQKVYMPREGKLISDINKAWERLEKAEHERELALRNELIRQEKLEQLARRFDRKAAMRETWLSENQRLVSQDNFGFDLPAVEAATKKHEAIETDIAAYEERVQAVVAVARELEAENYHDIKRITARKDNVIRLWEYLLELLRARRQRLEMNLGLQKIFQEMLYIMDWMDEMKVLVLSQDYGKHLLGVEDLLQKHTLVEADIGIQAERVRGVNASAQKFATDGEGYKPCDPQVIRDRVAHMEFCYQELCQLAAERRARLEESRRLWKFFWEMAEEEGWIREKEKILSSDDYGKDLTSVMRLLSKHRAFEDEMSGRSGHFEQAIKEGEDMIAEEHFGSEKIRERIIYIREQWANLEQLSAIRKKRLEEASLLHQFQADADDIDAWMLDILKIVSSSDVGHDEYSTQSLVKKHKDVAEEIANYRPTLDTLHEQASALPQEHAESPDVRGRLSGIEERYKEVAELTRLRKQALQDTLALYKMFSEADACELWIDEKEQWLNNMQIPEKLEDLEVIQHRFESLEPEMNNQASRVAVVNQIARQLMHSGHPSEKEIKAQQDKLNTRWSQFRELVDRKKDALLSALSIQNYHLECNETKSWIREKTKVIESTQDLGNDLAGVMALQRKLTGMERDLVAIEAKLSDLQKEAEKLESEHPDQAQAILSRLAEISDVWEEMKTTLKNREASLGEASKLQQFLRDLDDFQSWLSRTQTAIASEDMPNTLTEAEKLLTQHENIKNEIDNYEEDYQKMRDMGEMVTQGQTDAQYMFLRQRLQALDTGWNELHKMWENRQNLLSQSHAYQQFLRDTKQAEAFLNNQEYVLAHTEMPTTLEGAEAAIKKQEDFMTTMDANEEKINAVVETGRRLVSDGNINSDRIQEKVDSIDDRHRKNRETASELLMRLKDNRDLQKFLQDCQELSLWINEKMLTAQDMSYDEARNLHSKWLKHQAFMAELASNKEWLDKIEKEGMQLISEKPETEAVVKEKLTGLHKMWEVLESTTQTKAQRLFDANKAELFTQSCADLDKWLHGLESQIQSDDYGKDLTSVNILLKKQQMLENQMEVRKKEIEELQSQAQALSQEGKSTDEVDSKRLTVQTKFMELLEPLNERKHNLLASKEIHQFNRDVEDEILWVGERMPLATSTDHGHNLQTVQLLIKKNQTLQKEIQGHQPRIDDIFERSQNIVTDSSSLSAEAIRQRLADLKQLWGLLIEETEKRHRRLEEAHRAQQYYFDAAEAEAWMSEQELYMMSEEKAKDEQSAVSMLKKHQILEQAVEDYAETVHQLSKTSRALVADSHPESERISMRQSKVDKLYAGLKDLAEERRGKLDERHRLFQLNREVDDLEQWIAEREVVAGSHELGQDYEHVTMLQERFREFARDTGNIGQERVDTVNHLADELINSGHSDAATIAEWKDGLNEAWADLLELIDTRTQILAASYELHKFYHDAKEIFGRIQDKHKKLPEELGRDQNTVETLQRMHTTFEHDIQALGTQVRQLQEDAARLQAAYAGDKADDIQKRENEVLEAWKSLLDACESRRVRLVDTGDKFRFFSMVRDLMLWMEDVIRQIEAQEKPRDVSSVELLMNNHQGIKAEIDARNDSFTTCIELGKSLLARKHYASEEIKEKLLQLTEKRKEMIDKWEDRWEWLRLILEVHQFSRDASVAEAWLLGQEPYLSSREIGQSVDEVEKLIKRHEAFEKSAATWDERFSALERLTTLELLEVRRQQEEEERKRRPPSPEPSTKVSEEAESQQQWDTSKGEQVSQNGLPAEQGSPRMAETVDTSEMVNGATEQRTSSKESSPIPSPTSDRKAKTALPAQSAATLPARTQETPSAQMEGFLNRKHEWEAHNKKASSRSWHNVYCVINNQEMGFYKDAKTAASGIPYHSEVPVSLKEAVCEVALDYKKKKHVFKLRLNDGNEYLFQAKDDEEMNTWIQAISSAISSDKHEVSASTQSTPASSRAQTLPTSVVTITSESSPGKREKDKEKDKEKRFSLFGKKK

SEQ ID NO: 98 - protein, 1217 aa, Homo sapiens
MFLYNLTLQRATGISFAIHGNFSGTKQQEIVVSRGKILELLRPDPNTGKVHTLLTVEVFGVIRSLMAFRLTGGTKDYIVVGSDSGRIVILEYQPSKNMFEKIHQETFGKSGCRRIVPGQFLAVDPKGRAVMISAIEKQKLVYILNRDAAARLTISSPLEAHKANTLVYHVVGVDVGFENPMFACLEMDYEEADNDPTGEAAANTQQTLTFYELDLGLNHVVRKYSEPLEEHGNFLITVPGGSDGPSGVLICSENYITYKNFGDQPDIRCPIPRRRNDLDDPERGMIFVCSATHKTKSMFFFLAQTEQGDIFKITLETDEDMVTEIRLKYFDTVPVAAAMCVLKTGFLFVASEFGNHYLYQIAHLGDDDEEPEFSSAMPLEEGDTFFFQPRPLKNLVLVDELDSLSPILFCQIADLANEDTPQLYVACGRGPRSSLRVLRHGLEVSEMAVSELPGNPNAVWTVRRHIEDEFDAYIIVSFVNATLVLSIGETVEEVTDSGFLGTTPTLSCSLLGDDALVQVYPDGIRHIRADKRVNEWKTPGKKTIVKCAVNQRQVVIALTGGELVYFEMDPSGQLNEYTERKEMSADVVCMSLANVPPGEQRSRFLAVGLVDNTVRIISLDPSDCLQPLSMQALPAQPESLCIVEMGGTEKQDELGERGSIGFLYLNIGLQNGVLLRTVLDPVTGDLSDTRTRYLGSRPVKLFRVRMQGQEAVLAMSSRSWLSYSYQSRFHLTPLSYETLEFASGFASEQCPEGIVAISTNTLRILALEKLGAVFNQVAFPLQYTPRKFVIHPESNNLIIIETDHNAYTEATKAQRKQQMAEEMVEAAGEDERELAAEMAAAFLNENLPESIFGAPKAGNGQWASVIRVMNPIQGNTLDLVQLEQNEAAFSVAVCRFSNTGEDWYVLVGVAKDLILNPRSVAGGFVYTYKLVNNGEKLEFLHKTPVEEVPAAIAPFQGRVLIGVGKLLRVYDLGKKKLLRKCENKHIANYISGIQTIGHRVIVSDVQESFIWVRYKRNENQLIIFADDTYPRWVTTASLLDYDTVAGADKFGNICVVRLPPNTNDEVDEDPTGNKALWDRGLLNGASQKAEVIMNYHVGETVLSLQKTTLIPGGSESLVYTTLSGGIGILVPFTSHEDHDFFQHVEMHLRSEHPPLCGRDHLSFRSYYFPVKNVIDGDLCEQFNSMEPNKQKNVSEELDRTPPEVSKKLEDIRTRYAF

SEQ ID NO: 99 - protein, 1093 aa, Homo sapiens
MGTGDFICISMTGGAPWGFRLQGGKEQKQPLQVAKIRNQSKASGSGLCEGDEVVSINGNPCADLTYPEVIKLMESITDSLQMLIKRPSSGISEALISENENKNLEHLTHGGYVESTTLQIRPATKTQCTEFFLAPVKTEVPLAENQRSGPDCAGSLKEETGPSYQRAPQMPDSQRGRVAEELILREKVEAVQPGPVVELQLSLSQERHKGASGPLVALPGAEKSKSPDPDPNLSHDRIVHINSIPTNEKADPFLRSSKIIQISSGRELRVIQESEAGDAGLPRVEVILDCSDRQKTEGCRLQAGKECVDSPVEGGQSEAPPSLVSFAVSSEGTEQGEDPRSEKDHSRPHKHRARHARLRRSESLSEKQVKEAKSKCKSIALLLTDAPNPNSKGVLMFKKRRRRARKYTLVSYGTGELEREADEEEEGDKEDTCEVAFLGASESEVDEELLSDVDDNTQVVNFDWDSGLVDIEKKLNRGDKMEMLPDTTGKGALMFAKRRERMDQITAQKEEDKVGGTPSREQDAAQTDGLRTTTSYQRKEEESVRTQSSVSKSYIEVSHGLGHVPQQNGFSGTSETANIQRMVPMNRTAKPFPGSVNQPATPFSPTRNMTSPIADFPAPPPYSAVTPPPDAFSRGVSSPIAGPAQPPPWPQPAPWSQPAFYDSSERIASRDERISVPAKRTGILQEAKRRSTTKPMFTFKEPKVSPNPELLSLLQNSEGKRGTGAGGDSGPEEDYLSLGAEACNFMQSSSAKQKTPPPVAPKPAVKSSSSQPVTPVSPVWSPGVAPTQPPAFPTSNPSKGTVVSSIKIAQPSYPPARPASTLNVAGPFKGPQAAVASQNYTPKPTVSTPTVNAVQPGAVGPSNELPGMSGRGAQLFAKRQSRMEKYVVDSDTVQAHAARAQSPTPSLPASWKYSSNVRAPPPVAYNPIHSPSYPLAALKSQPSAAQPSKMGKKKGKKPLNALDVMKHQPYQLNASLFTFQPPDAKDGLPQKSSVKVNSALAMKQALPPRPVNAASPTNVQASSVYSVPAYTSPPSFFAEASSPVSASPVPVGIPTSPKQESASSSYFVAPRPKFSAKKSGVTIQVWKPSVVEE

SEQ ID NO: 100 - protein, 105 aa, Homo sapiens
MVKQIESKTAFQEALDAAGDKLVVVDFSATWCGPCKMIKPFFHSLSEKYSNVIFLEVDVDDCQDVASECEVKCMPTFQFFKKGQKVGEFSGANKEKLEATINELV

SEQ ID NO: 101 - protein, 1170 aa, Homo sapiens
MGLAWGLGVLFLMHVCGTNRIPESGGDNSVFDIFELTGAARKGSGRRLVKGPDPSSPAFRIEDANLIPPVPDDKFQDLVDAVRAEKGFLLLASLRQMKKTRGTLLALERKDHSGQVFSVVSNGKAGTLDLSLTVQGKQHVVSVEEALLATGQWKSITLFVQEDRAQLYIDCEKMENAELDVPIQSVFTRDLASIARLRIAKGGVNDNFQGVLQNVRFVFGTTPEDILRNKGCSSSTSVLLTLDNNVVNGSSPAIRTNYIGHKTKDLQAICGISCDELSSMVLELRGLRTIVTTLQDSIRKVTEENKELANELRRPPLCYHNGVQYRNNEEWTVDSCTECHCQNSVTICKKVSCPIMPCSNATVPDGECCPRCWPSDSADDGWSPWSEWTSCSTSCGNGIQQRGRSCDSLNNRCEGSSVQTRTCHIQECDKRFKQDGGWSHWSPWSSCSVTCGDGVITRIRLCNSPSPQMNGKPCEGEARETKACKKDACPINGGWGPWSPWDICSVTCGGGVQKRSRLCNNPTPQFGGKDCVGDVTENQICNKQDCPIDGCLSNPCFAGVKCTSYPDGSWKCGACPPGYSGNGIQCTDVDECKEVPDACFNHNGEHRCENTDPGYNCLPCPPRFTGSQPFGQGVEHATANKQVCKPRNPCTDGTHDCNKNAKCNYLGHYSDPMYRCECKPGYAGNGIICGEDTDLDGWPNENLVCVANATYHCKKDNCPNLPNSGQEDYDKDGIGDACDDDDDNDKIPDDRDNCPFHYNPAQYDYDRDDVGDRCDNCPYNHNPDQADTDNNGEGDACAADIDGDGILNERDNCQYVYNVDQRDTDMDGVGDQCDNCPLEHNPDQLDSDSDRIGDTCDNNQDIDEDGHQNNLDNCPYVPNANQADHDKDGKGDACDHDDDNDGIPDDKDNCRLVPNPDQKDSDGDGRGDACKDDFDHDSVPDIDDICPENVDISETDFRRFQMIPLDPKGTSQNDPNWVVRHQGKELVQTVNCDPGLAVGYDEFNAVDFSGTFFINTERDDDYAGFVFGYQSSSRFYVVMWKQVTQSYWDTNPTRAQGYSGLSVKVVNSTTGPGEHLRNALWHTGNTPGQVRTLWHDPRHIGWKDFTAYRWRLSHRPKTGFIRVVMYEGKKIMADSGPIYDKTYAGGRLGLFVFSQEMVFFSDLKYECRDP

SEQ ID NO: 102 - protein, 482 aa, Homo sapiens
MAALMTPGTGAPPAPGDFSGEGSQGLPDPSPEPKQLPELIRMKRDGGRLSEADIRGFVAAVVNGSAQGAQIGAMLMAIRLRGMDLEETSVLTQALAQSGQQLEWPEAWRQQLVDKHSTGGVGDKVSLVLAPALAACGCKVPMISGRGLGHTGGTLDKLESIPGFNVIQSPEQMQVLLDQAGCCIVGQSEQLVPADGILYAARDVTATVDSLPLITASILSKKLVEGLSALVVDVKFGGAAVFPNQEQARELAKTLVGVGASLGLRVAAALTAMDKPLGRCVGHALEVEEALLCMDGAGPPDLRDLVTTLGGALLWLSGHAGTQAQGAARVAAALDDGSALGRFERMLAAQGVDPGLARALCSGSPAERRQLLPRAREQEELLAPADGTVELVRALPLALVLHELGAGRSRAGEPLRLGVGAELLVDVGQRLRRGTPWLRVHRDGPALSGPQSRALQEALVLSDRAPFAAPSPFAELVLPPQQ

SEQ ID NO: 103 - protein, 34350 aa, Homo sapiens
MTTQAPTFTQPLQSVVVLEGSTATFEAHISGFPVPEVSWFRDGQVISTSTLPGVQISFSDGRAKLTIPAVTKANSGRYSLKATNGSGQATSTAELLVKAETAPPNFVQRLQSMTVRQGSQVRLQVRVTGIPTPVVKFYRDGAEIQSSLDFQISQEGDLYSLLIAEAYPEDSGTYSVNATNSVGRATSTAELLVQGEEEVPAKKTKTIVSTAQISESRQTRIEKKIEAHFDARSIATVEMVIDGAAGQQLPHKTPHRIPPKPKSRSPTPPSIAAKAQLARQQSPSPIRHSPSPVRHVRAPTPSPVRSVSPAARISTSPIRSVRSPLLMRKTQASTVATGPEVPPPWKQEGYVASSSEAEMRETTLTTSTQIRTEERWEGRYGVQEQVTISGAAGAAASVSASASYAAEAVATGAKEVKQDADKSAAVATVVAAVDMARVREPVISAVEQTAQRTTTTAVHIQPAQEQVRKEAEKTAVTKVVVAADKAKEQELKSRTKEVITTKQEQMHVTHEQIRKETEKTFVPKVVISAAKAKEQETRISEEITKKQKQVTQEAIRQETEITAASMVVVATAKSTKLETVPGAQEETTTQQDQMHLSYEKIMKETRKTVVPKVIVATPKVKEQDLVSRGREGITTKREQVQITQEKMRKEAEKTALSTIAVATAKAKEQETILRTRETMATRQEQIQVTHGKVDVGKKAEAVATVVAAVDQARVREPREPGHLEESYAQQTTLEYGYKERISAAKVAEPPQRPASEPHVVPKAVKPRVIQAPSETHIKTTDQKGMHISSQIKKTTDLTTERLVHVDKRPRTASPHFTVSKISVPKTEHGYEASIAGSAIATLQKELSATSSAQKITKSVKAPTVKPSETRVRAEPTPLPQFPFADTPDTYKSEAGVEVKKEVGVSITGTTVREERFEVLHGREAKVTETARVPAPVEIPVTPPTLVSGLKNVTVIEGESVTLECHISGYPSPTVTWYREDYQIESSIDFQITFQSGIARLMIREAFAEDSGRFTCSAVNEAGTVSTSCYLAVQVSEEFEKETTAVTEKFTTEEKRFVESRDVVMTDTSLTEEQAGPGEPAAPYFITKPVVQKLVEGGSVVFGCQVGGNPKPHVYWKKSGVPLTTGYRYKVSYNKQTGECKLVISMTFADDAGEYTIVVRNKHGETSASASLLEEADYELLMKSQQEMLYQTQVTAFVQEPKVGETAPGFVYSEYEKEYEKEQALIRKKMAKDTVVVRTYVEDQEFHISSFEERLIKEIEYRIIKTTLEELLEEDGEEKMAVDISESEAVESGFDLRIKNYRILEGMGVTFHCKMSGYPLPKIAWYKDGKRIKHGERYQMDFLQDGRASLRIPVVLPEDEGIYTAFASNIKGNAICSGKLYVEPAAPLGAPTYIPTLEPVSRIRSLSPRSVSRSPIRMSPARMSPARMSPARMSPARMSPGRRLEETDESQLERLYKPVFVLKPVSFKCLEGQTARFDLKVVGRPMPETFWFHDGQQIVNDYTHKVVIKEDGTQSLIIVPATPSDSGEWTVVAQNRAGRSSISVILTVEAVEHQVKPMFVEKLKNVNIKEGSQLEMKVRATGNPNPDIVWLKNSDIIVPHKYPKIRIEGTKGEAALKIDSTVSQDSAWYTATAINKAGRDTTRCKVNVEVEFAEPEPERKLIIPRGTYRAKEIAAPELEPLHLRYGQEQWEEGDLYDKEKQQKPFFKKKLTSLRLKRFGPAHFECRLTPIGDPTMVVEWLHDGKPLEAANRLRMINEFGYCSLDYGVAYSRDSGIITCRATNKYGTDHTSATLIVKDEKSLVEESQLPEGRKGLQRIEELERMAHEGALTGVTTDQKEKQKPDIVLYPEPVRVLEGETARFRCRVTGYPQPKVNWYLNGQLIRKSKRFRVRYDGIHYLDIVDCKSYDTGEVKVTAENPEGVIEHKVKLEIQQREDFRSVLRRAPEPRPEFHVHEPGKLQFEVQKVDRPVDTTETKEVVKLKRAERITHEKVPEESEELRSKFKRRTEEGYYEAITAVELKSRKKDESYEELLRKTKDELLHWTKELTEEEKKALAEEGKITIPTFKPDKIELSPSMEAPKIFERIQSQTVGQGSDAHFRVRVVGKPDPECEWYKNGVKIERSDRIYWYWPEDNVCELVIRDVTAEDSASIMVKAINIAGETSSHAFLLVQAKQLITFTQELQDVVAKEKDTMATFECETSEPFVKVKWYKDGMEVHEGDKYRMHSDRKVHFLSILTIDTSDAEDYSCVLVEDENVKTTAKLIVEGAVVEFVKELQDIEVPESYSGELECIVSPENIEGKWYHNDVELKSNGKYTITSRRGRQNLTVKDVTKEDQGEYSFVIDGKKTTCKLKMKPRPIAILQGLSDQKVCEGDIVQLEVKVSLESVEGVWMKDGQEVQPSDRVHIVIDKQSHMLLIEDMTKEDAGNYSFTIPALGLSTSGRVSVYSVDVITPLKDVNVIEGTKAVLECKVSVPDVTSVKWYLNDEQIKPDDRVQAIVKGTKQRLVINRTHASDEGPYKLIVGRVETNCNLSVEKIKIIRGLRDLTCTETQNVVFEVELSHSGIDVLWNFKDKEIKPSSKYKIEAHGKIYKLTVLNMMKDDEGKYTFYAGENITSGKLTVAGGAISKPLTDQTVAESQEAVFECEVANPDSKGEWLRDGKHLPLTNNIRSESDGHKRRLIIAATKLDDIGEYTYKVATSKTSAKLKVEAVKIKKTLKNLTVTETQDAVFTVELTHPNVKGVQWIKNGVVLESNEKYAISVKGTIYSLRIKNCAIVDESVYGFRLGRLGASARLHVETVKIIKKPKDVTALENATVAFEVSVSHDTVPVKWFHKNVEIKPSDKHRLVSERKVHKLMLQNISPSDAGEYTAVVGQLECKAKLFVETLHITKTMKNIEVPETKTASFECEVSHFNVPSMWLKNGVEIEMSEKFKIVVQGKLHQLIIMNTSTEDSAEYTFVCGNDQVSATLTVTPIMITSMLKDINAEEKDTITFEVTVNYEGISYKWLKNGVEIKSTDKCQMRTKKLTHSLNIRNVHFGDAADYTFVAGKATSTATLYVEARHIEFRKHIKDIKVLEKKRAMFECEVSEPDITVQWMKDDQELQITDRIKIQKEKYVHRLLIPSTRMSDAGKYTVVAGGNVSTAKLFVEGRDVRIRSIKKEVQVIEKQRAVVEFEVNEDDVDAHWYKDGIEINFQVQERHKYVVERRIHRMFISETRQSDAGEYTFVAGRNRSSVTLYVNAPEPPQVLQELQPVTVQSGKPARFCAVISGRPQPKISWYKEEQLLSTGFKCKFLHDGQEYTLLLIEAFPEDAAVYTCEAKNDYGVATTSASLSVEVPEVVSPDQEMPVYPPAIITPLQDTVTSEGQPARFQCRVSGTDLKVSWYSKDKKIKPSRFFRMTQFEDTYQLEIAEAYPEDEGTYTFVASNAVGQVSSTANLSLEAPESILHERIEQEIEMEMKEFSSSFLSAEEEGLHSAELQLSKINETLELLSESPVYSTKFDSEKEGTGPIFIKEVSNADISMGDVATLSVTVIGIPKPKIQWFFNGVLLTPSADYKFVFDGDDHSLIILFTKLEDEGEYTCMASNDYGKTICSAYLKINSKGEGHKDTETESAVAKSLEKLGGPCPPHFLKELKPIRCAQGLPAIFEYTVVGEPAPTVTWFKENKQLCTSVYYTIIHNPNGSGTFIVNDPQREDSGLYICKAENMLGESTCAAELLVLLEDTDMTDTPCKAKSTPEAPEDFPQTPLKGPAVEALDSEQEIATFVKDTILKAALITEENQQLSYEHIAKANELSSQLPLGAQELQSILEQDKLTPESTREFLCINGSIHFQPLKEPSPNLQLQIVQSQKTFSKEGILMPEEPETQAVLSDTEKIFPSAMSIEQINSLTVEPLKTLLAEPEGNYPQSSIEPPMHSYLTSVAEEVLSPKEKTVSDTNREQRVTLQKQEAQSALILSQSLAEGHVESLQSPDVMISQVNYEPLVPSEHSCTEGGKILIESANPLENAGQDSAVRIEEGKSLRFPLALEEKQVLLKEEHSDNVVMPPDQIIESKREPVAIKKVQEVQGRDLLSKESLLSGIPEEQRLNLKIQICRALQAAVASEQPGLFSEWLRNIEKVEVEAVNITQEPRHIMCMYLVTSAKSVTEEVTIIIEDVDPQMANLKMELRDALCAIIYEEIDILTAEGPRIQQGAKTSLQEEMDSFSGSQKVEPITEPEVESKYLISTEEVSYFNVQSRVKYLDATPVTKGVASAVVSDEKQDESLKPSEEKEESSSESGTEEVATVKIQEAEGGLIKEDGPMIHTPLVDTVSEEGDIVHLTTSITNAKEVNWYFENKLVPSDEKFKCLQDQNTYTLVIDKVNTEDHQGEYVCEALNDSGKTATSAKLTVVKRAAPVIKRKIEPLEVALGHLAKFTCEIQSAPNVRFQWFKAGREIYESDKCSIRSSKYISSLEILRTQVVDCGEYTCKASNEYGSVSCTATLTVTEAYPPTFLSRPKSLTTFVGKAAKFICTVTGTPVIETIWQKDGAALSPSPNWKISDAENKHILELSNLTIQDRGVYSCKASNKFGADICQAELIIIDKPHFIKELEPVQSAINKKVHLECQVDEDRKVTVTWSKDGQKLPPGKDYKICFEDKIATLEIPLAKLKDSGTYVCTASNEAGSSSCSATVTVREPPSFVKKVDPSYLMLPGESARLHCKLKGSPVIQVTWFKNNKELSESNTVRMYFVNSEAILDITDVKVEDSGSYSCEAVNDVGSDSCSTEIVIKEPPSFIKTLEPADIVRGTNALLQCEVSGTGPFEISWFKDKKQIRSSKKYRLFSQKSLVCLEIFSFNSADVGEYECVVANEVGKCGCMATHLLKEPPTFVKKVDDLIALGGQTVTLQAAVRGSEPISVTWMKGQEVIREDGKIKMSFSNGVAVLIIPDVQISFGGKYTCLAENEAGSQTSVGELIVKEPAKIIERAELIQVTAGDPATLEYTVAGTPELKPKWYKDGRPLVASKKYRISFKNNVAQLKFYSAELHDSGQYTFEISNEVGSSSCETTFTVLDRDIAPFFTKPLRNVDSVVNGTCRLDCKIAGSLPMRVSWFKDGKEIAASDRYRIAFVEGTASLEIIRVDMNDAGNFTCRATNSVGSKDSSGALIVQEPPSFVTKPGSKDVLPGSAVCLKSTFQGSTPLTIRWFKGNKELVSGGSCYITKEALESSLELYLVKTSDSGTYTCKVSNVAGGVECSANLFVKEPATFVEKLEPSQLLKKGDATQLACKVTGTPPIKITWFANDREIKESSKHRMSFVESTAVLRLTDVGIEDSGEYMCEAQNEAGSDHCSSIVIVKESPYFTKEFKPIEVLKEYDVMLLAEVAGTPPFEITWFKDNTILRSGRKYKTFIQDHLVSLQILKFVAADAGEYQCRVTNEVGSSICSARVTLREPPSFIKKIESTSSLRGGTAAFQATLKGSLPITVTWLKDSDEITEDDNIRMTFENNVASLYLSGIEVKHDGKYVCQAKNDAGIQRCSALLSVKEPATITEEAVSIDVTQGDPATLQVKFSGTKEITAKWFKDGQELTLGSKYKISVTDTVSILKIISTEKKDSGEYTFEVQNDVGRSSCKARINVLDLIIPPSFTKKLKKMDSIKGSFIDLECIVAGSHPISIQWFKDDQEISASEKYKFSFHDNTAFLEISQLEGTDSGTYTCSATNKAGHNQCSGHLTVKEPPYFVEKPQSQDVNPNTRVQLKALVGGTAPMTIKWFKDNKELHSGAARSVWKDDTSTSLELFAAKATDSGTYICQLSNDVGTATSKATLFVKEPPQFIKKPSPVLVLRNGQSTTFECQITGTPKIRVSWYLDGNEITAIQKHGISFIDGLATFQISGARVENSGTYVCEARNDAGTASCSIELKVKEPPTFIRELKPVEVVKYSDVELECEVTGTPPFEVTWLKNNREIRSSKKYTLTDRVSVFNLHITKCDPSDTGEYQCIVSNEGGSCSCSTRVALKEPPSFIKKIENTTTVLKSSATFQSTVAGSPPISITWLKDDQILDEDDNVYISFVDSVATLQIRSVDNGHSGRYTCQAKNESGVERCYAFLLVQEPAQIVEKAKSVDVTEKDPMTLECVVAGTPELKVKWLKDGKQIVPSRYFSMSFENNVASFRIQSVMKQDSGQYTFKVENDFGSSSCDAYLRVLDQNIPPSFTKKLTKMDKVLGSSIHMECKVSGSLPISAQWFKDGKEISTSAKYRLVCHERSVSLEVNNLELEDTANYTCKVSNVAGDDACSGILTVKEPPSFLVKPGRQQAIPDSTVEFKAILKGTPPFKIKWFKDDVELVSGPKCFIGLEGSTSFLNLYSVDASKTGQYTCHVTNDVGSDSCTTMLLVTEPPKFVKKLEASKIVKAGDSSRLECKIAGSPEIRVVWFRNEHELPASDKYRMTFIDSVAVIQMNNLSTEDSGDFICEAQNPAGSTSCSTKVIVKEPPVFSSFPPIVETLKNAEVSLECELSGTPPFEVVWYKDKRQLRSSKKYKIASKNFHTSIHILNVDTSDIGEYHCKAQNEVGSDTCVCTVKLKEPPRFVSKLNSLTVVAGEPAELQASIEGAQPIFVQWLKEKEEVIRESENIRITFVENVATLQFAKAEPANAGKYICQIKNDGGMEENMATLMVLEPAVIVEKAGPMTVTVGETCTLECKVAGTPELSVEWYKDGKLLTSSQKHKFSFYNKISSLRILSVERQDAGTYTFQVQNNVGKSSCTAVVDVSDRAVPPSFTRRLKNTGGVLGASCILECKVAGSSPISVAWFHEKTKIVSGAKYQTTFSDNVCTLQLNSLDSSDMGNYTCVAANVAGSDECRAVLTVQEPPSFVKEPEPLEVLPGKNVTFTSVIRGTPPFKVNWFRGARELVKGDRCNIYFEDTVAELELFNIDISQSGEYTCVVSNNAGQASCTTRLFVKEPAAFLKRLSDHSVEPGKSIILESTYTGTLPISVTWKKDGFNITTSEKCNIVTTEKTCILEILNSTKRDAGQYSCEIENEAGRDVCGALVSTLEPPYFVTELEPLEAAVGDSVSLQCQVAGTPEITVSWYKGDTKLRPTPEYRTYFTNNVATLVFNKVNINDSGEYTCKAENSIGTASSKTVFRIQERQLPPSFARQLKDIEQTVGLPVTLTCRLNGSAPIQVCWYRDGVLLRDDENLQTSFVDNVATLKILQTDLSHSGQYSCSASNPLGTASSSARLTAREPKKSPFFDIKPVSIDVIAGESADFECHVTGAQPMRITWSKDNKEIRPGGNYTITCVGNTPHLRILKVGKGDSGQYTCQATNDVGKDMCSAQLSVKEPPKFVKKLEASKVAKQGESIQLECKISGSPEIKVSWFRNDSELHESWKYNMSFINSVALLTINEASAEDSGDYICEAHNGVGDASCSTALTVKAPPVFTQKPSPVGALKGSDVILQCEISGTPPFEVVWVKDRKQVRNSKKFKITSKHFDTSLHILNLEASDVGEYHCKATNEVGSDTCSCSVKFKEPPRFVKKLSDTSTLIGDAVELRAIVEGFQPISVVWLKDRGEVIRESENTRISFIDNIATLQLGSPEASNSGKYICQIKNDAGMRECSAVLTVLEPARIIEKPEPMTVTTGNPFALECVVTGTPELSAKWFKDGRELSADSKHHITFINKVASLKIPCAEMSDKGLYSFEVKNSVGKSNCTVSVHVSDRIVPPSFIRKLKDVNAILGASVVLECRVSGSAPISVGWFQDGNEIVSGPKCQSSFSENVCTLNLSLLEPSDTGIYTCVAANVAGSDECSAVLTVQEPPSFEQTPDSVEVLPGMSLTFTSVIRGTPPFKVKWFKGSRELVPGESCNISLEDFVTELELFEVQPLESGDYSCLVTNDAGSASCTTHLFVKEPATFVKRLADFSVETGSPIVLEATYTGTPPISVSWIKDEYLISQSERCSITMTEKSTILEILESTIEDYAQYSCLIENEAGQDICEALVSVLEPPYFIEPLEHVEAVIGEPATLQCKVDGTPEIRISWYKEHTKLRSAPAYKMQFKNNVASLVINKVDHSDVGEYSCKADNSVGAVASSAVLVIKERKLPPFFARKLKDVHETLGFPVAFECRINGSEPLQVSWYKDGVLLKDDANLQTSFVHNVATLQILQTDQSHIGQYNCSASNPLGTASSSAKLILSEHEVPPFFDLKPVSVDLALGESGTFKCHVTGTAPIKITWAKDNREIRPGGNYKMTLVENTATLTVLKVGKGDAGQYTCYASNIAGKDSCSAHLGVQEPPRFIKKLEPSRIVKQDEFTRYECKIGGSPEIKVLWYKDETEIQESSKFRMSFVDSVAVLEMHNLSVEDSGDYTCEAHNAAGSASSSTSLKVKEPPIFRKKPHPIETLKGADVHLECELQGTPPFHVSWYKDKRELRSGKKYKIMSENFLTSIHILNVDAADIGEYQCKATNDVGSDTCVGSIALKAPPRFVKKLSDISTVVGKEVQLQTTIEGAEPISVVWFKDKGEIVRESDNIWISYSENIATLQFSRVEPANAGKYTCQIKNDAGMQECFATLSVLEPATIVEKPESIKVTTGDTCTLECTVAGTPELSTKWFKDGKELTSDNKYKISFFNKVSGLKIINVAPSDSGVYSFEVQNPVGKDSCTASLQVSDRTVPPSFTRKLKETNGLSGSSVVMECKVYGSPPISVSWFHEGNEISSGRKYQTTLTDNTCALTVNMLEESDSGDYTCIATNMAGSDECSAPLTVREPPSFVQKPDPMDVLTGTNVTFTSIVKGTPPFSVSWFKGSSELVPGDRCNVSLEDSVAELELFDVDTSQSGEYTCIVSNEAGKASCTTHLYIKAPAKFVKRLNDYSIEKGKPLILEGTFTGTPPISVTWKKNGINVTPSQRCNITTTEKSAILEIPSSTVEDAGQYNCYIENASGKDSCSAQILILEPPYFVKQLEPVKVSVGDSASLQCQLAGTPEIGVSWYKGDTKLRPTTTYKMHFRNNVATLVFNQVDINDSGEYICKAENSVGEVSASTFLTVQEQKLPPSFSRQLRDVQETVGLPVVFDCAISGSEPISVSWYKDGKPLKDSPNVQTSFLDNTATLNIFKTDRSLAGQYSCTATNPIGSASSSARLILTEGKNPPFFDIRLAPVDAVVGESADFECHVTGTQPIKVSWAKDSREIRSGGKYQISYLENSAHLTVLKVDKGDSGQYTCYAVNEVGKDSCTAQLNIKERLIPPSFTKRLSETVEETEGNSFKLEGRVAGSQPITVAWYKNNIEIQPTSNCEITFKNNTLVLQVRKAGMNDAGLYTCKVSNDAGSALCTSSIVIKEPKKPPVFDQHLTPVTVSEGEYVQLSCHVQGSEPIRIQWLKAGREIKPSDRCSFSFASGTAVLELRDVAKADSGDYVCKASNVAGSDTTKSKVTIKDKPAVAPATKKAAVDGRLFFVSEPQSIRVVEKTTATFIAKVGGDPIPNVKWTKGKWRQLNQGGRVFIHQKGDEAKLEIRDTTKTDSGLYRCVAFNEHGEIESNVNLQVDERKKQEKIEGDLRAMLKKTPILKKGAGEEEEIDIMELLKNVDPKEYEKYARMYGITDFRGLLQAFELLKQSQEEETHRLEIEEIERSERDEKEFEELVSFIQQRLSQTEPVTLIKDIENQTVLKDNDAVFEIDIKINYPEIKLSWYKGTEKLEPSDKFEISIDGDRHTLRVKNCQLKDQGNYRLVCGPHIASAKLTVIEPAWERHLQDVTLKEGQTCTMTCQFSVPNVKSEWFRNGRILKPQGRHKTEVEHKVHKLTIADVRAEDQGQYTCKYEDLETSAELRIEAEPIQFTKRIQNIVVSEHQSATFECEVSFDDAIVTWYKGPTELTESQKYNFRNDGRCHYMTIHNVTPDDEGVYSVIARLEPRGEARSTAELYLTTKEIKLELKPPDIPDSRVPIPTMPIRAVPPEEIPPVVAPPIPLLLPTPEEKKPPPKRIEVTKKAVKKDAKKVVAKPKEMTPREEIVKKPPPPTTLIPAKAPEIIDVSSKAEEVKIMTITRKKEVQKEKEAVYEKKQAVHKEKRVFIESFEEPYDELEVEPYTEPFEQPYYEEPDEDYEEIKVEAKKEVHEEWEEDFEEGQEYYEREEGYDEGEEEWEEAYQEREVIQVQKEVYEESHERKVPAKVPEKKAPPPPKVIKKPVIEKIEKTSRRMEEEKVQVTKVPEVSKKIVPQKPSRTPVQEEVIEVKVPAVHTKKMVISEEKMFFASHTEEEVSVTVPEVQKEIVTEEKIHVAVSKRVEPPPKVPELPEKPAPEEVAPVPIPKKVEPPAPKVPEVPKKPVPEEKKPVPVPKKEPAAPPKVPEVPKKPVPEEKIPVPVAKKKEAPPAKVPEVQKRVVTEEKITIVTQREESPPPAVPEIPKKKVPEERKPVPRKEEEVPPPPKVPALPKKPVPEEKVAVPVPVAKKAPPPRAEVSKKTVVEEKRFVAEEKLSFAVPQRVEVTRHEVSAEEEWSYSEEEEGVSISVYREEEREEEEEAEVTEYEVMEEPEEYVVEEKLHIISKRVEAEPAEVTERQEKKIVLKPKIPAKIEEPPPAKVPEAPKKIVPEKKVPAPVPKKEKVPPPKVPEEPKKPVPEKKVPPKVIKMEEPLPAKVTERHMQITQEEKVLVAVTKKEAPPKARVPEEPKRAVPEEKVLKLKPKREEEPPAKVTEFRKRVVKEEKVSIEAPKREPQPIKEVTIMEEKERAYTLEEEAVSVQREEEYEEYEEYDYKEFEEYEPTEEYDQYEEYEEREYERYEEHEEYITEPEKPIPVKPVPEEPVPTKPKAPPAKVLKKAVPEEKVPVPIPKKLKPPPPKVPEEPKKVFEEKIRISITKREKEQVTEPAAKVPMKPKRVVAEEKVPVPRKEVAPPVRVPEVPKELEPEEVAFEEEVVTHVEEYLVEEEEEYIHEEEEFITEEEVVPVIPVKVPEVPRKPVPEEKKPVPVPKKKEAPPAKVPEVPKKPEEKVPVLIPKKEKPPPAKVPEVPKKPVPEEKVPVPVPKKVEAPPAKVPEVPKKPVPEKKVPVPAPKKVEAPPAKVPEVPKKLIPEEKKPTPVPKKVEAPPPKVPKKREPVPVPVALPQEEEVLFEEEIVPEEEVLPEEEEVLPEEEEVLPEEEEVLPEEEEIPPEEEEVPPEEEYVPEEEEFVPEEEVLPEVKPKVPVPAPVPEIKKKVTEKKVVIPKKEEAPPAKVPEVPKKVEEKRIILPKEEEVLPVEVTEEPEEEPISEEEIPEEPPSIEEVEEVAPPRVPEVIKKAVPEAPTPVPKKVEAPPAKVSKKIPEEKVPVPVQKKEAPPAKVPEVPKKVPEKKVLVPKKEAVPPAKGRTVLEEKVSVAFRQEVVVKERLELEVVEAEVEEIPEEEEFHEVEEYFEEGEFHEVEEFIKLEQHRVEEEHRVEKVHRVIEVFEAEEVEVFEKPKAPPKGPEISEKIIPPKKPPTKVVPRKEPPAKVPEVPKKIVVEEKVRVPEEPRVPPTKVPDVLPPKEVVPEKKVPVPPAKKPEAPPPKVPEAPKEVVPEKKVPVPPPKKPEVPPTKVPEVPKAAVPEKKVPEAIPPKPESPPPEVPEAPKEVVPEKKVPAAPPKKPEVTPVKVPEAPKEVVPEKKVPVPPPKKPEVPPTKVPEVPKVAVPEKKVPEAIPPKPESPPPEVFEEPEEVALEEPPAEVVEEPEPAAPPQVTVPPKKPVPEKKAPAVVAKKPELPPVKVPEVPKEVVPEKKVPLVVPKKPEAPPAKVPEVPKEVVPEKKVAVPKKPEVPPAKVPEVPKKPVLEEKPAVPVPERAESPPPEVYEEPEEIAPEEEIAPEEEKPVPVAEEEEPEVPPPAVPEEPKKIIPEKKVPVIKKPEAPPPKEPEPEKVIEKPKLKPRPPPPPPAPPKEDVKEKIFQLKAIPKKKVPEKPQVPEKVELTPLKVPGGEKKVRKLLPERKPEPKEEVVLKSVLRKRPEEEEPKVEPKKLEKVKKPAVPEPPPPKPVEEVEVPTVTKRERKIPEPTKVPEIKPAIPLPAPEPKPKPEAEVKTIKPPPVEPEPTPIAAPVTVPVVGKKAEAKAPKEEAAKPKGPIKGVPKKTPSPIEAERRKLRPGSGGEKPPDEAPFTYQLKAVPLKFVKEIKDIILTESEFVGSSAIFECLVSPSTAITTWMKDGSNIRESPKHRFIADGKDRKLHIIDVQLSDAGEYTCVLRLGNKEKTSTAKLVVEELPVRFVKTLEEEVTVVKGQPLYLSCELNKERDVVWRKDGKIVVEKPGRIVPGVIGLMRALTINDADDTDAGTYTVTVENANNLECSSCVKVVEVIRDWLVKPIRDQHVKPKGTAIFACDIAKDTPNIKWFKGYDEIPAEPNDKTEILRDGNHLYLKIKNAMPEDIAEYAVEIEGKRYPAKLTLGEREVELLKPIEDVTIYEKESASFDAEISEADIPGQWKLKGELLRPSPTCEIKAEGGKRFLTLRKVKLDQAGEVLYQALNAITTAILTVKEIELDFAVPLKDVTVPERRQARFECVLTREANVIWSKGPDIIKSSDKFDIIADGKKHILVINDSQFDDEGVYTAEVEGKKTSARLFVTGIRLKFMSPLEDQTVKEGETATFVCELSHEKMHVVWFKNDAKLHTSRTVLISSEGKTHKLEMKEVTLDDISQIKAQVKELSSTAQLKVLEADPYFTVKLHDKTAVEKDEITLKCEVSKDVPVKWFKDGEEIVPSPKYSIKADGLRRILKIKKADLKDKGEYVCDCGTDKTKANVTVEARLIKVEKPLYGVEVFVGETAHFEIELSEPDVHGQWKLKGQPLTASPDCEIIEDGKKHILILHNCQLGMTGEVSFQAANAKSAANLKVKELPLIFITPLSDVKVFEKDEAKFECEVSREPKTFRWLKGTQEITGDDRFELIKDGTKHSMVIKSAAFEDEAKYMFEAEDKHTSGKLIIEGIRLKFLTPLKDVTAKEKESAVFTVELSHDNIRVKWFKNDQRLHTTRSVSMQDEGKTHSITFKDLSIDDTSQIRVEAMGMSSEAKLTVLEGDPYFTGKLQDYTGVEKDEVILQCEISKADAPVKWFKDGKEIKPSKNAVIKADGKKRMLILKKALKSDIGQYTCDCGTDKTSGKLDIEDREIKLVRPLHSVEVMETETARFETEISEDDIHANWKLKGEALLQTPDCEIKEEGKIHSLVLHNCRLDQTGGVDFQAANVKSSAHLRVKPRVIGLLRPLKDVTVTAGETATFDCELSYEDIPVEWYLKGKKLEPSDKVVPRSEGKVHTLTLRDVKLEDAGEVQLTAKDFKTHANLFVKEPPVEFTKPLEDQTVEEGATAVLECEVSRENAKVKWFKNGTEILKSKKYEIVADGRVRKLVIHDCTPEDIKTYTCDAKDFKTSCNLNVVPPHVEFLRPLTDLQVREKEMARFECELSRENAKVKWFKDGAEIKKGKKYDIISKGAVRILVINKCLLDDEAEYSCEVRTARTSGMLTVLEEEAVFTKNLANIEVSETDTIKLVCEVSKPGAEVIWYKGDEEIIETGRYEILTEGRKRILVIQNAHLEDAGNYNCRLPSSRTDGKVKVHELAAEFISKPQNLEILEGEKAEFVCSISKESFPVQWKRDDKTLESGDKYDVIADGKKRVLVVKDATLQDMGTYVVMVGAARAAAHLTVIEKLRIVVPLKDTRVKEQQEVVFNCEVNTEGAKAKWFRNEEAIFDSSKYIILQKDLVYTLRIRDAHLDDQANYNVSLTNHRGENVKSAANLIVEEEDLRIVEPLKDIETMEKKSVTFWCKVNRLNVTLKWTKNGEEVPFDNRVSYRVDKYKHMLTIKDCGFPDEGEYIVTAGQDKSVAELLIIEAPTEFVEHLEDQTVTEFDDAVFSCQLSREKANVKWYRNGREIKEGKKYKFEKDGSIHRLIIKDCRLDDECEYACGVEDRKSRARLFVEEIPVEIIRPPQDILEAPGADVVFLAELNKDKVEVQWLRNNMVVVQGDKHQMMSEGKIHRLQICDIKPRDQGEYRFIAKDKEARAKLELAAAPKIKTADQDLVVDVGKPLTMVVPYDAYPKAEAEWFKENEPLSTKTIDTTAEQTSFRILEAKKGDKGRYKIVLQNKHGKAEGFINLKVIDVPGPVRNLEVTETFDGEVSLAWEEPLTDGGSKIIGYVVERRDIKRKTWVLATDRAESCEFTVTGLQKGGVEYLFRVSARNRVGTGEPVETDNPVEARSKYDVPGPPLNVTITDVNRFGVSLTWEPPEYDGGAEITNYVIELRDKTSIRWDTAMTVRAEDLSATVTDVVEGQEYSFRVRAQNRIGVGKPSAATPFVKVADPIERPSPPVNLTSSDQTQSSVQLKWEPPLKDGGSPILGYIIERCEEGKDNWIRCNMKLVPELTYKVTGLEKGNKYLYRVSAENKAGVSDPSEILGPLTADDAFVEPTMDLSAFKDGLEVIVPNPITILVPSTGYPRPTATWCFGDKVLETGDRVKMKTLSAYAELVISPSERSDKGIYTLKLENRVKTISGEIDVNVIARPSAPKELKFGDITKDSVHLTWEPPDDDGGSPLTGYVVEKREVSRKTWTKVMDFVTDLEFTVPDLVQGKEYLFKVCARNKCGPGEPAYVDEPVNMSTPATVPDPPENVKWRDRTANSIFLTWDPPKNDGGSRIKGYIVERCPRGSDKWVACGEPVAETKMEVTGLEEGKWYAYRVKALNRQGASKPSRPTEEIQAVDTQEAPEIFLDVKLLAGLTVKAGTKIELPATVTGKPEPKITWTKADMILKQDKRITIENVPKKSTVTIVDSKRSDTGTYIIEAVNVCGRATAVVEVNVLDKPGPPAAFDITDVTNESCLLTWNPPRDDGGSKITNYVVERRATDSEVWHKLSSTVKDTNFKATKLIPNKEYIFRVAAENMYGVGEPVQASPITAKYQFDPPGPPTRLEPSDITKDAVTLTWCEPDDDGGSPITGYWVERLDPDTDKWVRCNKMPVKDTTYRVKGLTNKKKYRFRVLAENLAGPGKPSKSTEPILIKDPIDPPWPPGKPTVKDVGKTSVRLNWTKPEHDGGAKIESYVIEMLKTGTDEWVRVAEGVPTTQHLLPGLMEGQEYSFRVRAVNKAGESEPSEPSDPVLCREKLYPPSPPRWLEVINITKNTADLKWTVPEKDGGSPITNYIVEKRDVRRKGWQTVDTTVKDTKCTVTPLTEGSLYVFRVAAENAIGQSDYTEIEDSVLAKDTFTTPGPPYALAVVDVTKRHVDLKWEPPKNDGGRPIQRYVIEKKERLGTRWVKAGKTAGPDCNFRVTDVIEGTEVQFQVRAENEAGVGHPSEPTEILSIEDPTSPPSPPLDLHVTDAGRKHIAIAWKPPEKNGGSPIIGYHVEMCPVGTEKWMRVNSRPIKDLKFKVEEGVVPDKEYVLRVRAVNAIGVSEPSEISENVVAKDPDCKPTIDLETHDIIVIEGEKLSIPVPFRAVPVPTVSWHKDGKEVKASDRLTMKNDHISAHLEVPKSVRADAGIYTITLENKLGSATASINVKVIGLPGPCKDIKASDITKSSCKLTWEPPEFDGGTPILHYVLERREAGRRTYIPVMSGENKLSWTVKDLIPNGEYFFRVKAVNKVGGGEYIELKNPVIAQDPKQPPDPPVDVEVHNPTAEAMTITWKPPLYDGGSKIMGYIIEKIAKGEERWKRCNEHLVPILTYTAKGLEEGKEYQFRVRAENAAGISEPSRATPPTKAVDPIDAPKVILRTSLEVKRGDEIALDASISGSPYPTITWIKDENVIVPEEIKKRAAPLVRRRKGEVQEEEPFVLPLTQRLSIDNSKKGESQLRVRDSLRPDHGLYMIKVENDHGIAKAPCTVSVLDTPGPPINFVFEDIRKTSVLCKWEPPLDDGGSEIINYTLEKKDKTKPDSEWIVVTSTLRHCKYSVTKLIEGKEYLFRVRAENRFGPGPPCVSKPLVAKDPFGPPDAPDKPIVEDVTSNSMLVKWNEPKDNGSPILGYWLEKREVNSTHWSRVNKSLLNALKANVDGLLEGLTYVFRVCAENAAGPGKFSPPSDPKTAHDPISPPGPPIPRVTDTSSTTIELEWEPPAFNGGGEIVGYFVDKQLVGTNEWSRCTEKMIKVRQYTVKEIREGADYKLRVSAVNAAGEGPPGETQPVTVAEPQEPPAVELDVSVKGGIQIMAGKTLRIPAVVTGRPVPTKVWTKEEGELDKDRVVIDNVGTKSELIIKDALRKDHGRYVITATNSCGSKFAAARVEVFDVPGPVLDLKPVVTNRKMCLLNWSDPEDDGGSEITGFIIERKDAKMHTWRQPIETERSKCDITGLLEGQEYKFRVIAKNKFGCGPPVEIGPILAVDPLGPPTSPERLTYTERTKSTITLDWKEPRSNGGSPIQGYIIEKRRHDKPDFERVNKRLCPTTSFLVENLDEHQMYEFRVKAVNEIGESEPSLPLNVVIQDDEVPPTIKLRLSVRGDTIKVKAGEPVHIPADVTGLPMPKIEWSKNETVIEKPTDALQITKEEVSRSEAKTELSIPKAVREDKGTYTVTASNRLGSVFRNVHVEVYDRPSPPRNLAVTDIKAESCYLTWDAPLDNGGSEITHYVIDKRDASRKKAEWEEVTNTAVEKRYGIWKLIPNGQYEFRVRAVNKYGISDECKSDKVVIQDPYRLPGPPGKPKVLARTKGSMLVSWTPPLDNGGSPITGYWLEKREEGSPYWSRVSRAPITKVGLKGVEFNVPRLLEGVKYQFRAMAINAAGIGPPSEPSDPEVAGDPIFPPGPPSCPEVKDKTKSSISLGWKPPAKDGGSPIKGYIVEMQEEGTTDWKRVNEPDKLITTCECVVPNLKELRKYRFRVKAVNEAGESEPSDTTGEIPATDIQEEPEVFIDIGAQDCLVCKAGSQIRIPAVIKGRPTPKSSWEFDGKAKKAMKDGVHDIPEDAQLETAENSSVIIIPECKRSHTGKYSITAKNKAGQKTANCRVKVMDVPGPPKDLKVSDITRGSCRLSWKMPDDDGGDRIKGYVIEKRTIDGKAWTKVNPDCGSTTFVVPDLLSEQQYFFRVRAENRFGIGPPVETIQRTTARDPIYPPDPPIKLKIGLITKNTVHLSWKPPKNDGGSPVTHYIVECLAWDPTGTKKEAWRQCNKRDVEELQFTVEDLVEGGEYEFRVKAVNAAGVSKPSATVGPCDCQRPDMPPSIDLKEFMEVEEGTNVNIVAKIKGVPFPTLTWFKAPPKKPDNKEPVLYDTHVNKLVVDDTCTLVIPQSRRSDTGLYTITAVNNLGTASKEMRLNVLGRPGPPVGPIKFESVSADQMTLSWFPPKDDGGSKITNYVIEKREANRKTWVHVSSEPKECTYTIPKLLEGHEYVFRIMAQNKYGIGEPLDSEPETARNLFSVPGAPDKPTVSSVTRNSMTVNWEEPEYDGGSPVTGYWLEMKDTTSKRWKRVNRDPIKAMTLGVSYKVTGLIEGSDYQFRVYAINAAGVGPASLPSDPATARDPIAPPGPPFPKVTDWTKSSADLEWSPPLKDGGSKVTGYIVEYKEEGKEEWEKGKDKEVRGTKLVVTGLKEGAFYKFRVSAVNIAGIGEPGEVTDVIEMKDRLVSPDLQLDASVRDRIVVHAGGVIRIIAYVSGKPPPTVTWNMNERTLPQEATIETTAISSSMVIKNCQRSHQGVYSLLAKNEAGERKKTIIVDVLDVPGPVGTPFLAHNLTNESCKLTWFSPEDDGGSPITNYVIEKRESDRRAWTPVTYTVTRQNATVQGLIQGKAYFFRIAAENSIGMGPFVETSEALVIREPITVPERPEDLEVKEVTKNTVTLTWNPPKYDGGSEIINYVLESRLIGTEKFHKVTNDNLLSRKYTVKGLKEGDTYEYRVSAVNIVGQGKPSFCTKPITCKDELAPPTLHLDFRDKLTIRVGEAFALTGRYSGKPKPKVSWFKDEADVLEDDRTHIKTTPATLALEKIKAKRSDSGKYCVVVENSTGSRKGFCQVNVVDRPGPPVGPVSFDEVTKDYMVISWKPPLDDGGSKITNYIIEKKEVGKDVWMPVTSASAKTTCKVSKLLEGKDYIFRIHAENLYGISDPLVSDSMKAKDRFRVPDAPDQPIVTEVTKDSALVTWNKPHDGGKPITNYILEKRETMSKRWARVTKDPIHPYTKFRVPDLLEGCQYEFRVSAENEIGIGDPSPPSKPVFAKDPIAKPSPPVNPEAIDTTCNSVDLTWQPPRHDGGSKILGYIVEYQKVGDEEWRRANHTPESCPETKYKVTGLRDGQTYKFRVLAVNAAGESDPAHVPEPVLVKDRLEPPELILDANMAREQHIKVGDTLRLSAIIKGVPFPKVTWKKEDRDAPTKARIDVTPVGSKLEIRNAAHEDGGIYSLTVENPAGSKTVSVKVLVLDKPGPPRDLEVSEIRKDSCYLTWKEPLDDGGSVITNYVVERRDVASAQWSPLSATSKKKSHFAKHLNEGNQYLFRVAAENQYGRGPFVETPKPIKALDPLHPPGPPKDLHHVDVDKTEVSLVWNKPDRDGGSPITGYLVEYQEEGTQDWIKFKTVTNLECVVTGLQQGKTYRFRVKAENIVGLGLPDTTIPIECQEKLVPPSVELDVKLIEGLVVKAGTTVRFPAIIRGVPVPTAKWTTDGSEIKTDEHYTVETDNFSSVLTIKNCLRRDTGEYQITVSNAAGSKTVAVHLTVLDVPGPPTGPINILDVTPEHMTISWQPPKDDGGSPVINYIVEKQDTRKDTWGVVSSGSSKTKLKIPHLQKGCEYVFRVRAENKIGVGPPLDSTPTVAKHKFSPPSPPGKPVVTDITENAATVSWTLPKSDGGSPITGYYMERREVTGKWVRVNKTPIADLKFRVTGLYEGNTYEFRVFAENLAGLSKPSPSSDPIKACRPIKPPGPPINPKLKDKSRETADLVWTKPLSDGGSPILGYVVECQKPGTAQWNRINKDELIRQCAFRVPGLIEGNEYRFRIKAANIVGEGEPRELAESVIAKDILHPPEVELDVTCRDVITVRVGQTIRILARVKGRPEPDITWTKEGKVLVREKRVDLIQDLPRVELQIKEAVRADHGKYIISAKNSSGHAQGSAIVNVLDRPGPCQNLKVTNVTKENCTISWENPLDNGGSEITNFIVEYRKPNQKGWSIVASDVTKRLIKANLLANNEYYFRVCAENKVGVGPTIETKTPILAINPIDRPGEPENLHIADKGKTFVYLKWRRPDYDGGSPNLSYHVERRLKGSDDWERVHKGSIKETHYMVDRCVENQIYEFRVQTKNEGGESDWVKTEEVVVKEDLQKPVLDLKLSGVLTVKAGDTIRLEAGVRGKPFPEVAWTKDKDATDLTRSPRVKIDTRADSSKFSLTKAKRSDGGKYVVTATNTAGSFVAYATVNVLDKPGPVRNLKIVDVSSDRCTVCWDPPEDDGGCEIQNYILEKCETKRMVWSTYSATVLTPGTTVTRLIEGNEYIFRVRAENKIGTGPPTESKPVIAKTKYDKPGRPDPPEVTKVSKEEMTVVWNPPEYDGGKSITGYFLEKKEKHSTRWVPVNKSAIPERRMKVQNLLPDHEYQFRVKAENEIGIGEPSLPSRPVVAKDPIEPPGPPTNFRVVDTTKHSITLGWGKPVYDGGAPIIGYVVEMRPKIADASPDEGWKRCNAAAQLVRKEFTVTSLDENQEYEFRVCAQNQVGIGRPAELKEAIKPKEILEPPEIDLDASMRKLVIVRAGCPIRLFAIVRGRPAPKVTWRKVGIDNVVRKGQVDLVDTMAFLVIPNSTRDDSGKYSLTLVNPAGEKAVFVNVRVLDTPGPVSDLKVSDVTKTSCHVSWAPPENDGGSQVTHYIVEKREADRKTWSTVTPEVKKTSFHVTNLVPGNEYYFRVTAVNEYGPGVPTDVPKPVLASDPLSEPDPPRKLEVTEMTKNSATLAWLPPLRDGGAKIDGYITSYREEEQPADRWTEYSVVKDLSLVVTGLKEGKKYKFRVAARNAVGVSLPREAEGVYEAKEQLLPPKILMPEQITIKAGKKLRIEAHVYGKPHPTCKWKKGEDEVVTSSHLAVHKADSSSILIIKDVTRKDSGYYSLTAENSSGTDTQKIKVVVMDAPGPPQPPFDISDIDADACSLSWHIPLEDGGSNITNYIVEKCDVSRGDWVTALASVTKTSCRVGKLIPGQEYIFRVRAENRFGISEPLTSPKMVAQFPFGVPSEPKNARVTKVNKDCIFVAWDRPDSDGGSPIIGYLIERKERNSLLWVKANDTLVRSTEYPCAGLVEGLEYSFRIYALNKAGSSPPSKPTEYVTARMPVDPPGKPEVIDVTKSTVSLIWARPKHDGGSKIIGYFVEACKLPGDKWVRCNTAPHQIPQEEYTATGLEEKAQYQFRAIARTAVNISPPSEPSDPVTILAENVPPRIDLSVAMKSLLTVKAGTNVCLDATVFGKPMPTVSWKKDGTLLKPAEGIKMAMQRNLCTLELFSVNRKDSGDYTITAENSSGSKSATIKLKVLDKPGPPASVKINKMYSDRAMLSWEPPLEDGGSEITNYIVDKRETSRPNWAQVSATVPITSCSVEKLIEGHEYQFRICAENKYGVGDPVFTEPAIAKNPYDPPGRCDPPVISNITKDHMTVSWKPPADDGGSPITGYLLEKRETQAVNWTKVNRKPIIERTLKATGLQEGTEYEFRVTAINKAGPGKPSDASKAAYARDPQYPPAPPAFPKVYDTTRSSVSLSWGKPAYDGGSPIIGYLVEVKRADSDNWVRCNLPQNLQKTRFEVTGLMEDTQYQFRVYAVNKIGYSDPSDVPDKHYPKDILIPPEGELDADLRKTLILRAGVTMRLYVPVKGRPPPKITWSKPNVNLRDRIGLDIKSTDFDTFLRCENVNKYDAGKYILTLENSCGKKEYTIVVKVLDTPGPPVNVTVKEISKDSAYVTWEPPIIDGGSPIINYVVQKRDAERKSWSTVTTECSKTSFRVANLEEGKSYFFRVFAENEYGIGDPGETRDAVKASQTPGPVVDLKVRSVSKSSCSIGWKKPHSDGGSRIIGYVVDFLTEENKWQRVMKSLSLQYSAKDLTEGKEYTFRVSAENENGEGTPSEITVVARDDVVAPDLDLKGLPDLCYLAKENSNFRLKIPIKGKPAPSVSWKKGEDPLATDTRVSVESSAVNTTLIVYDCQKSDAGKYTITLKNVAGTKEGTISIKVVGKPGIPTGPIKFDEVTAEAMTLKWAPPKDDGGSEITNYILEKRDSVNNKWVTCASAVQKTTFRVTRLHEGMEYTFRVSAENKYGVGEGLKSEPIVARHPFDVPDAPPPPNIVDVRHDSVSLTWTDPKKTGGSPITGYHLEFKERNSLLWKRANKTPIRMRDFKVTGLTEGLEYEFRVMAINLAGVGKPSLPSEPVVALDPIDPPGKPEVINITRNSVTLIWTEPKYDGGHKLTGYIVEKRDLPSKSWMKANHVNVPECAFTVTDLVEGGKYEFRIRAKNTAGAISAPSESTETIICKDEYEAPTIVLDPTIKDGLTIKAGDTIVLNAISILGKPLPKSSWSKAGKDIRPSDITQITSTPTSSMLTIKYATRKDAGEYTITATNPFGTKVEHVKVTVLDVPGPPGPVEISNVSAEKATLTWTPPLEDGGSPIKSYILEKRETSRLLWTVVSEDIQSCRHVATKLIQGNEYIFRVSAVNHYGKGEPVQSEPVKMVDRFGPPGPPEKPEVSNVTKNTATVSWKRPVDDGGSEITGYHVERREKKSLRWVRAIKTPVSDLRCKVTGLQEGSTYEFRVSAENRAGIGPPSEASDSVLMKDAAYPPGPPSNPHVTDTTKKSASLAWGKPHYDGGLEITGYVVEHQKVGDEAWIKDTTGTALRITQFVVPDLQTKEKYNFRISAINDAGVGEPAVIPDVEIVEREMAPDFELDAELRRTLVVRAGLSIRIFVPIKGRPAPEVTWTKDNINLKNRANIENTESFTLLIIPECNRYDTGKFVMTIENPAGKKSGFVNVRVLDTPGPVLNLRPTDITKDSVTLHWDLPLIDGGSRITNYIVEKREATRKSYSTATTKCHKCTYKVTGLSEGCEYFFRVMAENEYGIGEPTETTEPVKASEAPSPPDSLNIMDITKSTVSLAWPKPKHDGGSKITGYVIEAQRKGSDQWTHITTVKGLECVVRNLTEGEEYTFQVMAVNSAGRSAPRESRPVIVKEQTMLPELDLRGIYQKLVIAKAGDNIKVEIPVLGRPKPTVTWKKGDQILKQTQRVNFETTATSTILNINECVRSDSGPYPLTARNIVGEVGDVITIQVHDIPGPPTGPIKFDEVSSDFVTFSWDPPENDGGVPISNYVVEMRQTDSTTWVELATTVIRTTYKATRLTTGLEYQFRVKAQNRYGVGPGITSACIVANYPFKVPGPPGTPQVTAVTKDSMTISWHEPLSDGGSPILGYHVERKERNGILWQTVSKALVPGNIFKSSGLTDGIAYEFRVIAENMAGKSKPSKPSEPMLALDPIDPPGKPVPLNITRHTVTLKWAKPEYTGGFKITSYIVEKRDLPNGRWLKANFSNILENEFTVSGLTEDAAYEFRVIAKNAAGAISPPSEPSDAITCRDDVEAPKIKVDVKFKDTVILKAGEAFRLEADVSGRPPPTMEWSKDGKELEGTAKLEIKIADFSTNLVNKDSTRRDSGAYTLTATNPGGFAKHIFNVKVLDRPGPPEGPLAVTEVTSEKCVLSWFPPLDDGGAKIDHYIVQKRETSRLAWTNVASEVQVTKLKVTKLLKGNEYIFRVMAVNKYGVGEPLESEPVLAVNPYGPPDPPKNPEVTTITKDSMVVCWGHPDSDGGSEIINYIVERRDKAGQRWIKCNKKTLTDLRYKVSGLTEGHEYEFRIMAENAAGISAPSPTSPFYKACDTVFKPGPPGNPRVLDTSRSSISIAWNKPIYDGGSEITGYMVEIALPEEDEWQIVTPPAGLKATSYTITGLTENQEYKIRIYAMNSEGLGEPALVPGTPKAEDRMLPPEIELDADLRKVVTIRACCTLRLFVPIKGRPAPEVKWARDHGESLDKASIESTSSYTLLIVGNVNRFDSGKYILTVENSSGSKSAFVNVRVLDTPGPPQDLKVKEVTKTSVTLTWDPPLLDGGSKIKNYIVEKRESTRKAYSTVATNCHKTSWKVDQLQEGCSYYFRVLAENEYGIGLPAETAESVKASERPLPPGKITLMDVTRNSVSLSWEKPEHDGGSRILGYIVEMQTKGSDKWATCATVKVTEATITGLIQGEEYSFRVSAQNEKGISDPRQLSVPVIAKDLVIPPAFKLLFNTFTVLAGEDLKVDVPFIGRPTPAVTWHKDNVPLKQTTRVNAESTENNSLLTIKDACREDVGHYVVKLTNSAGEAIETLNVIVLDKPGPPTGPVKMDEVTADSITLSWGPPKYDGGSSINNYIVEKRDTSTTTWQIVSATVARTTIKACRLKTGCEYQFRIAAENRYGKSTYLNSEPTVAQYPFKVPGPPGTPVVTLSSRDSMEVQWNEPISDGGSRVIGYHLERKERNSILWVKLNKTPIPQTKFKTTGLEEGVEYEFRVSAENIVGIGKPSKVSECYVARDPCDPPGRPEAIIVTRNSVTLQWKKPTYDGGSKITGYIVEKKELPEGRWMKASFTNIIDTHFEVTGLVEDHRYEFRVIARNAAGVFSEPSESTGAITARDEVDPPRISMDPKYKDTIVVHAGESFKVDADIYGKPIPTIQWIKGDQELSNTARLEIKSTDFATSLSVKDAVRVDSGNYILKAKNVAGERSVTVNVKVLDRPGPPEGPVVISGVTAEKCTLAWKPPLQDGGSDIINYIVERRETSRLVWTVVDANVQTLSCKVTKLLEGNEYTFRIMAVNKYGVGEPLESEPVVAKNPFVVPDAPKAPEVTTVTKDSMIVVWERPASDGGSEILGYVLEKRDKEGIRWTRCHKRLIGELRLRVTGLIENHDYEFRVSAENAAGLSEPSPPSAYQKACDPIYKPGPPNNPKVIDITRSSVFLSWSKPIYDGGCEIQGYIVEKCDVSVGEWTMCTPPTGINKTNIEVEKLLEKHEYNFRICAINKAGVGEHADVPGPIIVEEKLEAPDIDLDLELRKIINIRAGGSLRLFVPIKGRPTPEVKWGKVDGEIRDAAIIDVTSSFTSLVLDNVNRYDSGKYTLTLENSSGTKSAFVTVRVLDTPSPPVNLKVTEITKDSVSITWEPPLLDGGSKIKNYIVEKREATRKSYAAVVTNCHKNSWKIDQLQEGCSYYFRVTAENEYGIGLPAQTADPIKVAEVPQPPGKITVDDVTRNSVSLSWTKPEHDGGSKIIQYIVEMQAKHSEKWSECARVKSLQAVITNLTQGEEYLFRVVAVNEKGRSDPRSLAVPIVAKDLVIEPDVKPAFSSYSVQVGQDLKIEVPISGRPKPTITWTKDGLPLKQTTRINVTDSLDLTTLSIKETHKDDGGQYGITVANVVGQKTASIEIVTLDKPDPPKGPVKFDDVSAESITLSWNPPLYTGGCQITNYIVQKRDTTTTVWDVVSATVARTTLKVTKLKTGTEYQFRIFAENRYGQSFALESDPIVAQYPYKEPGPPGTPFATAISKDSMVIQWHEPVNNGGSPVIGYHLERKERNSILWTKVNKTIIHDTQFKAQNLEEGIEYEFRVYAENIVGVGKASKNSECYVARDPCDPPGTPEPIMVKRNEITLQWTKPVYDGGSMITGYIVEKRDLPDGRWMKASFTNVIETQFTVSGLTEDQRYEFRVIAKNAAGAISKPSDSTGPITAKDEVELPRISMDPKFRDTIVVNAGETFRLEADVHGKPLPTIEWLRGDKEIEESARCEIKNTDFKALLIVKDAIRIDGGQYILRASNVAGSKSFPVNVKVLDRPGPPEGPVQVTGVTSEKCSLTWSPPLQDGGSDISHYVVEKRETSRLAWTVVASEVVTNSLKVTKLLEGNEYVFRIMAVNKYGVGEPLESAPVLMKNPFVLPGPPKSLEVTNIAKDSMTVCWNRPDSDGGSEIIGYIVEKRDRSGIRWIKCNKRRITDLRLRVTGLTEDHEYEFRVSAENAAGVGEPSPATVYYKACDPVFKPGPPTNAHIVDTTKNSITLAWGKPIYDGGSEILGYVVEICKADEEEWQIVTPQTGLRVTRFEISKLTEHQEYKIRVCALNKVGLGEATSVPGTVKPEDKLEAPELDLDSELRKGIVVRAGGSARIHIPFKGRPTPEITWSREEGEFTDKVQIEKGVNYTQLSIDNCDRNDAGKYILKLENSSGSKSAFVTVKVLDTPGPPQNLAVKEVRKDSAFLVWEPPIIDGGAKVKNYVIDKRESTRKAYANVSSKCSKTSFKVENLTEGAIYYFRVMAENEFGVGVPVETVDAVKAAEPPSPPGKVTLTDVSQTSASLMWEKPEHDGGSRVLGYVVEMQPKGTEKWSIVAESKVCNAVVTGLSSGQEYQFRVKAYNEKGKSDPRVLGVPVIAKDLTIQPSLKLPFNTYSIQAGEDLKIEIPVIGRPRPNISWVKDGEPLKQTTRVNVEETATSTVLHIKEGNKDDFGKYTVTATNSAGTATENLSVIVLEKPGPPVGPVRFDEVSADFVVISWEPPAYTGGCQISNYIVEKRDTTTTTWHMVSATVARTTIKITKLKTGTEYQFRIFAENRYGKSAPLDSKAVIVQYPFKEPGPPGTPFVTSISKDQMLVQWHEPVNDGGTKIIGYHLEQKEKNSILWVKLNKTPIQDTKFKTTGLDEGLEYEFKVSAENIVGIGKPSKVSECFVARDPCDPPGRPEAIVITRNNVTLKWKKPAYDGGSKITGYIVEKKDLPDGRWMKASFTNVLETEFTVSGLVEDQRYEFRVIARNAAGNFSEPSDSSGAITARDEIDAPNASLDPKYKDVIVVHAGETFVLEADIRGKPIPDVVWSKDGKELEETAARMEIKSTIQKTTLVVKDCIRTDGGQYILKLSNVGGTKSIPITVKVLDRPGPPEGPLKVTGVTAEKCYLAWNPPLQDGGANISHYIIEKRETSRLSWTQVSTEVQALNYKVTKLLPGNEYIFRVMAVNKYGIGEPLESGPVTACNPYKPPGPPSTPEVSAITKDSMVVTWARPVDDGGTEIEGYILEKRDKEGVRWTKCNKKTLTDLRLRVTGLTEGHSYEFRVAAENAAGVGEPSEPSVFYRACDALYPPGPPSNPKVTDTSRSSVSLAWSKPIYDGGAPVKGYVVEVKEAAADEWTTCTPPTGLQGKQFTVTKLKENTEYNFRICAINSEGVGEPATLPGSVVAQERIEPPEIELDADLRKVVVLRASATLRLFVTIKGRPEPEVKWEKAEGILTDRAQIEVTSSFTMLVIDNVTRFDSGRYNLTLENNSGSKTAFVNVRVLDSPSAPVNLTIREVKKDSVTLSWEPPLIDGGAKITNYIVEKRETTRKAYATITNNCTKTTFRIENLQEGCSYYFRVLASNEYGIGLPAETTEPVKVSEPPLPPGRVTLVDVTRNTATIKWEKPESDGGSKITGYVVEMQTKGSEKWSTCTQVKTLEATISGLTAGEEYVFRVAAVNEKGRSDPRQLGVPVIARDIEIKPSVELPFHTFNVKAREQLKIDVPFKGRPQATVNWRKDGQTLKETTRVNVSSSKTVTSLSIKEASKEDVGTYELCVSNSAGSITVPITIIVLDRPGPPGPIRIDEVSCDSITISWNPPEYDGGCQISNYIVEKKETTSTTWHIVSQAVARTSIKIVRLTTGSEYQFRVCAENRYGKSSYSESSAVVAEYPFSPPGPPGTPKVVHATKSTMLVTWQVPVNDGGSRVIGYHLEYKERSSILWSKANKILIADTQMKVSGLDEGLMYEYRVYAENIAGIGKCSKSCEPVPARDPCDPPGQPEVTNITRKSVSLKWSKPHYDGGAKITGYIVERRELPDGRWLKCNYTNIQETYFEVTELTEDQRYEFRVFARNAADSVSEPSESTGPIIVKDDVEPPRVMMDVKFRDVIVVKAGEVLKINADIAGRPLPVISWAKDGIEIEERARTEIISTDNHTLLTVKDCIRRDTGQYVLTLKNVAGTRSVAVNCKVLDKPGPPAGPLEINGLTAEKCSLSWGRPQEDGGADIDYYIVEKRETSHLAWTICEGELQMTSCKVTKLLKGNEYIFRVTGVNKYGVGEPLESVAIKALDPFTVPSPPTSLEITSVTKESMTLCWSRPESDGGSEISGYIIERREKNSLRWVRVNKKPVYDLRVKSTGLREGCEYEYRVYAENAAGLSLPSETSPLIRAEDPVFLPSPPSKPKIVDSGKTTITIAWVKPLFDGGAPITGYTVEYKKSDDTDWKTSIQSLRGTEYTISGLTTGAEYVFRVKSVNKVGASDPSDSSDPQIAKEREEEPLFDIDSEMRKTLIVKAGASFTMTVPFRGRPVPNVLWSKPDTDLRTRAYVDTTDSRTSLTIENANRNDSGKYTLTIQNVLSAASLTLVVKVLDTPGPPTNITVQDVTKESAVLSWDVPENDGGAPVKNYHIEKREASKKAWVSVTNNCNRLSYKVTNLQEGAIYYFRVSGENEFGVGIPAETKEGVKITEKPSPPEKLGVTSISKDSVSLTWLKPEHDGGSRIVHYVVEALEKGQKNWVKCAVAKSTHHVVSGLRENSEYFFRVFAENQAGLSDPRELLLPVLIKEQLEPPEIDMKNFPSHTVYVRAGSNLKVDIPISGKPLPKVTLSRDGVPLKATMRFNTEITAENLTINLKESVTADAGRYEITAANSSGTTKAFINIVVLDRPGPPTGPVVISDITEESVTLKWEPPKYDGGSQVTNYILLKRETSTAVWTEVSATVARTMMKVMKLTTGEEYQFRIKAENRFGISDHIDSACVTVKLPYTTPGPPSTPWVTNVTRESITVGWHEPVSNGGSAVVGYHLEMKDRNSILWQKANKLVIRTTHFKVTTISAGLIYEFRVYAENAAGVGKPSHPSEPVLAIDACEPPRNVRITDISKNSVSLSWQQPAFDGGSKITGYIVERRDLPDGRWTKASFTNVTETQFIISGLTQNSQYEFRVFARNAVGSISNPSEVVGPITCIDSYGGPVIDLPLEYTEVVKYRAGTSVKLRAGISGKPAPTIEWYKDDKELQTNALVCVENTTDLASILIKDADRLNSGCYELKLRNAMGSASATIRVQILDKPGPPGGPIEFKTVTAEKITLLWRPPADDGGAKITHYIVEKRETSRVVWSMVSEHLEECIITTTKIIKGNEYIFRVRAVNKYGIGEPLESDSVVAKNAFVTPGPPGIPEVTKITKNSMTVVWSRPIADGGSDISGYFLEKRDKKSLGWFKVLKETIRDTRQKVTGLTENSDYQYRVCAVNAAGQGPFSEPSEFYKAADPIDPPGPPAKIRIADSTKSSITLGWSKPVYDGGSAVTGYVVEIRQGEEEEWTTVSTKGEVRTTEYVVSNLKPGVNYYFRVSAVNCAGQGEPIEMNEPVQAKDILEAPEIDLDVALRTSVIAKAGEDVQVLIPFKGRPPPTVTWRKDEKNLGSDARYSIENTDSSSLLTIPQVTRNDTGKYILTIENGVGEPKSSTVSVKVLDTPAACQKLQVKHVSRGTVTLLWDPPLIDGGSPIINYVIEKRDATKRTWSVVSHKCSSTSFKLIDLSEKTPFFFRVLAENEIGIGEPCETTEPVKAAEVPAPIRDLSMKDSTKTSVILSWTKPDFDGGSVITEYVVERKGKGEQTWSHAGISKTCEIEVSQLKEQSVLEFRVFAKNEKGLSDPVTIGPITVKELIITPEVDLSDIPGAQVTVRIGHNVHLELPYKGKPKPSISWLKDGLPLKESEFVRFSKTENKITLSIKNAKKEHGGKYTVILDNAVCRIAVPITVITLGPPSKPKGPIRFDEIKADSVILSWDVPEDNGGGEITCYSIEKRETSQTNWKMVCSSVARTTFKVPNLVKDAEYQFRVRAENRYGVSQPLVSSIIVAKHQFRIPGPPGKPVIYNVTSDGMSLTWDAPVYDGGSEVTGFHVEKKERNSILWQKVNTSPISGREYRATGLVEGLDYQFRVYAENSAGLSSPSDPSKFTLAVSPVDPPGTPDYIDVTRETITLKWNPPLRDGGSKIVGYSIEKRQGNERWVRCNFTDVSECQYTVTGLSPGDRYEFRIIARNAVGTISPPSQSSGIIMTRDENVPPIVEFGPEYFDGLIIKSGESLRIKALVQGRPVPRVTWFKDGVEIEKRMNMEITDVLGSTSLFVRDATRDHRGVYTVEAKNASGSAKAEIKVKVQDTPGKVVGPIRFTNITGEKMTLWWDAPLNDGCAPITHYIIEKRETSRLAWALIEDKCEAQSYTAIKLINGNEYQFRVSAVNKFGVGRPLDSDPVVAQIQYTVPDAPGIPEPSNITGNSITLTWARPESDGGSEIQQYILERREKKSTRWVKVISKRPISETRFKVTGLTEGNEYEFHVMAENAAGVGPASGISRLIKCREPVNPPGPPTVVKVTDTSKTTVSLEWSKPVFDGGMEIIGYIIEMCKADLGDWHKVNAEACVKTRYTVTDLQAGEEYKFRVSAINGAGKGDSCEVTGTIKAVDRLTAPELDIDANFKQTHVVRAGASIRLFIAYQGRPTPTAVWSKPDSNLSLRADIHTTDSFSTLTVENCNRNDAGKYTLTVENNSGSKSITFTVKVLDTPGPPGPITFKDVTRGSATLMWDAPLLDGGARIHHYVVEKREASRRSWQVISEKCTRQIFKVNDLAEGVPYYFRVSAVNEYGVGEPYEMPEPIVATEQPAPPRRLDVVDTSKSSAVLAWLKPDHDGGSRITGYLLEMRQKGSDFWVEAGHTKQLTFTVERLVEKTEYEFRVKAKNDAGYSEPREAFSSVIIKEPQIEPTADLTGITNQLITCKAGSPFTIDVPISGRPAPKVTWKLEEMRLKETDRVSITTTKDRTTLTVKDSMRGDSGRYFLTLENTAGVKTFSVTVVVIGRPGPVTGPIEVSSVSAESCVLSWGEPKDGGGTEITNYIVEKRESGTTAWQLVNSSVKRTQIKVTHLTKYMEYSFRVSSENRFGVSKPLESAPIIAEHPFVPPSAPTRPEVYHVSANAMSIRWEEPYHDGGSKIIGYWVEKKERNTILWVKENKVPCLECNYKVTGLVEGLEYQFRTYALNAAGVSKASEASRPIMAQNPVDAPGRPEVTDVTRSTVSLIWSAPAYDGGSKVVGYIIERKPVSEVGDGRWLKCNYTIVSDNFFTVTALSEGDTYEFRVLAKNAAGVISKGSESTGPVTCRDEYAPPKAELDARLHGDLVTIRAGSDLVLDAAVGGKPEPKIIWTKGDKELDLCEKVSLQYTGKRATAVIKFCDRSDSGKYTLTVKNASGTKAVSVMVKVLDSPGPCGKLTVSRVTQEKCTLAWSLPQEDGGAEITHYIVERRETSRLNWVIVEGECPTLSYVVTRLIKNNEYIFRVRAVNKYGPGVPVESEPIVARNSFTIPSPPGIPEEVGTGKEHIIIQWTKPESDGGNEISNYLVDKREKKSLRWTRVNKDYVVYDTRLKVTSLMEGCDYQFRVTAVNAAGNSEPSEASNFISCREPSYTPGPPSAPRVVDTTKHSISLAWTKPMYDGGTDIVGYVLEMQEKDTDQWYRVHTNATIRNTEFTVPDLKMGQKYSFRVAAVNVKGMSEYSESIAEIEPVERIEIPDLELADDLKKTVTIRAGASLRLMVSVSGRPPPVITWSKQGIDLASRAIIDTTESYSLLIVDKVNRYDAGKYTIEAENQSGKKSATVLVKVYDTPGPCPSVKVKEVSRDSVTITWEIPTIDGGAPVNNYIVEKREAAMRAFKTVTTKCSKTLYRISGLVEGTMYYFRVLPENIYGIGEPCETSDAVLVSEVPLVPAKLEVVDVTKSTVTLAWEKPLYDGGSRLTGYVLEACKAGTERWMKVVTLKPTVLEHTVTSLNEGEQYLFRIRAQNEKGVSEPRETVTAVTVQDLRVLPTIDLSTMPQKTIHVPAGRPVELVIPIAGRPPPAASWFFAGSKLRESERVTVETHTKVAKLTIRETTIRDTGEYTLELKNVTGTTSETIKVIILDKPGPPTGPIKIDEIDATSITISWEPPELDGGAPLSGYVVEQRDAHRPGWLPVSESVTRSTFKFTRLTEGNEYVFRVAATNRFGIGSYLQSEVIECRSSIRIPGPPETLQIFDVSRDGMTLTWYPPEDDGGSQVTGYIVERKEVRADRWVRVNKVPVTMTRYRSTGLTEGLEYEHRVTAINARGSGKPSRPSKPIVAMDPIAPPGKPQNPRVTDTTRTSVSLAWSVPEDEGGSKVTGYLIEMQKVDQHEWTKCNTTPTKIREYTLTHLPQGAEYRFRVLACNAGGPGEPAEVPGTVKVTEMLEYPDYELDERYQEGIFVRQGGVIRLTIPIKGKPFPICKWTKEGQDISKRAMIATSETHTELVIKEADRGDSGTYDLVLENKCGKKAVYIKVRVIGSPNSPEGPLEYDDIQVRSVRVSWRPPADDGGADILGYILERREVPKAAWYTIDSRVRGTSLVVKGLKENVEYHFRVSAENQFGISKPLKSEEPVTPKTPLNPPEPPSNPPEVLDVTKSSVSLSWSRPKDDGGSRVTGYYIERKETSTDKWVRHNKTQITTTMYTVTGLVPDAEYQFRIIAQNDVGLSETSPASEPVVCKDPFDKPSQPGELEILSISKDSVTLQWEKPECDGGKEILGYWVEYRQSGDSAWKKSNKERIKDKQFTIGGLLEATEYEFRVFAENETGLSRPRRTAMSIKTKLTSGEAPGIRKEMKDVTTKLGEAAQLSCQIVGRPLPDIKWYRFGKELIQSRKYKMSSDGRTHTLTVMTEEQEDEGVYTCIATNEVGEVETSSKLLLQATPQFHPGYPLKEKYYGAVGSTLRLHVMYIGRPVPAMTWFHGQKLLQNSENITIENTEHYTHLVMKNVQRKTHAGKYKVQLSNVFGTVDAILDVEIQDKPDKPTGPIVIEALLKNSAVISWKPPADDGGSWITNYVVEKCEAKEGAEWQLVSSAISVTTCRIVNLTENAGYYFRVSAQNTFGISDPLEVSSVVIIKSPFEKPGAPGKPTITAVTKDSCVVAWKPPASDGGAKIRNYYLEKREKKQNKWISVTTEEIRETVFSVKNLIEGLEYEFRVKCENLGGESEWSEISEPITPKSDVPIQAPHFKEELRNLNVRYQSNATLVCKVTGHPKPIVKWYRQGKEIIADGLKYRIQEFKGGYHQLIIASVTDDDATVYQVRATNQGGSVSGTASLEVEVPAKIHLPKTLEGMGAVHALRGEVVSIKIPFSGKPDPVITWQKGQDLIDNNGHYQVIVTRSFTSLVFPNGVERKDAGFYVVCAKNRFGIDQKTVELDVADVPDPPRGVKVSDVSRDSVNLTWTEPASDGGSKITNYIVEKCATTAERWLRVGQARETRYTVINLFGKTSYQFRVIAENKFGLSKPSEPSEPTITKEDKTRAMNYDEEVDETREVSMTKASHSSTKELYEKYMIAEDLGRGEFGIVHRCVETSSKKTYMAKFVKVKGTDQVLVKKEISILNIARHRNILHLHESFESMEELVMIFEFISGLDIFERINTSAFELNEREIVSYVHQVCEALQFLHSHNIGHFDIRPENIIYQTRRSSTIKIIEFGQARQLKPGDNFRLLFTAPEYYAPEVHQHDVVSTATDMWSLGTLVYVLLSGINPFLAETNQQIIENIMNAEYTFDEEAFKEISIEAMDFVDRLLVKERKSRMTASEALQHPWLKQKIERVSTKVIRTLKHRRYYHTLIKKDLNMVVSAARISCGGAIRSQKGVSVAKVKVASIEIGPVSGQIMHAVGEEGGHVKYVCKIENYDQSTQVTWYFGVRQLENSEKYEITYEDGVAILYVKDITKLDDGTYRCKVVNDYGEDSSYAELFVKGVREVYDYYCRRTMKKIKRRTDTMRLLERPPEFTLPLYNKTAYVGENVRFGVTITVHPEPHVTWYKSGQKIKPGDNDKKYTFESDKGLYQLTINSVTTDDDAEYTVVARNKYGEDSCKAKLTVTLHPPPTDSTLRPMFKRLLANAECQEGQSVCFEIRVSGIPPPTLKWEKDGQPLSLGPNIEIIHEGLDYYALHIRDTLPEDTGYYRVTATNTAGSTSCQAHLQVERLRYKKQEFKSKEEHERHVQKQIDKTLRMAEILSGTESVPLTQVAKEALREAAVLYKPAVSTKTVKGEFRLEIEEKKEERKLRMPYDVPEPRKYKQTTIEEDQRIKQFVPMSDMKWYKKIRDQYEMPGKLDRVVQKRPKRIRLSRWEQFYVMPLPRITDQYRPKWRIPKLSQDDLEIVRPARRRTPSPDYDFYYRPRRRSLGDISDEELLLPIDDYLAMKRTEEERLRLEEELELGFSASPPSRSPPHFELSSLRYSSPQAHVKVEETRKDFRYSTYHIPTKAEASTSYAELRERHAQAAYRQPKQRQRIMAEREDEELLRPVTTTQHLSEYKSELDFMSKEEKSRKKSRRQREVTEITEIEEEYEISKHAQRESSSSASRLLRRRRSLSPTYIELMRPVSELIRSRPQPAEEYEDDTERRSPTPERTRPRSPSPVSSERSLSRFERSARFDIFSRYESMKAALKTQKTSERKYEVLSQQPFTLDHAPRITLRMRSHRVPCGQNTRFILNVQSKPTAEVKWYHNGVELQESSKIHYTNTSGVLTLEILDCHTDDSGTYRAVCTNYKGEASDYATLDVTGGDYTTYASQRRDEEVPRSVFPELTRTEAYAVSSFKKTSEMEASSSVREVKSQMTETRESLSSYEHSASAEMKSAALEEKSLEEKSTTRKIKTTLAARILTKPRSMTVYEGESARFSCDTDGEPVPTVTWLRKGQVLSTSARHQVTTTKYKSTFEISSVQASDEGNYSVVVENSEGKQEAEFTLTIQKARVTEKAVTSPPRVKSPEPRVKSPEAVKSPKRVKSPEPSHPKAVSPTETKPTPTEKVQHLPVSAPPKITQFLKAEASKEIAKLTCVVESSVLRAKEVTWYKDGKKLKENGHFQFHYSADGTYELKINNLTESDQGEYVCEISGEGGTSKTNLQFMGQAFKSIHEKVSKISETKKSDQKTTESTVTRKTEPKAPEPISSKPVIVTGLQDTTVSSDSVAKFAVKATGEPRPTAIWTKDGKAITQGGKYKLSEDKGGFFLEIHKTDTSDSGLYTCTVKNSAGSVSSSCKLTIKAIKDTEAQKVSTQKTSEITPQKKAVVQEEISQKALRSEEIKMSEAKSQEKLALKEEASKVLISEEVKKSAATSLEKSIVHEEITKTSQASEEVRTHAEIKAFSTQMSINEGQRLVLKANIAGATDVKWVLNGVELTNSEEYRYGVSGSDQTLTIKQASHRDEGILTCISKTKEGIVKCQYDLTLSKELSDAPAFISQPRSQNINEGQNVLFTCEISGEPSPEIEWFKNNLPISISSNVSISRSRNVYSLEIRNASVSDSGKYTIKAKNFRGQCSATASLMVLPLVEEPSREVVLRTSGDTSLQGSFSSQSVQMSASKQEASFSSFSSSSASSMTEMKFASMSAQSMSSMQESFVEMSSSSFMGISNMTQLESSTSKMLKAGIRGIPPKIEALPSDISIDEGKVLTVACAFTGEPTPEVTWSCGGRKIHSQEQGRFHIENTDDLTTLIIMDVQKQDGGLYTLSLGNEFGSDSATVNIHIRSI

SEQ ID NO: 104 - protein, 358 aa, Homo sapiens
MAEQIIQEIYSQIQSKKKILATPPQEDAPSVDIANIRMPSLPSYKVGDKIATRKAYGQALAKLGHASDRIIALDGDTKNSTFSEIFKKEHPDRFIECYIAEQNMVSIAVGCATRNRTVPFCSTFAAFFTRAFDQIRMAAISESNINLCGSHCGVSIGEDGPSQMALEDLAMFRSVPTSTVFYPSDGVATEKAVELAANTKGICFIRTSRPENAIIYNNNEDFQVGQAKVVLKSKDDQVTVIGAGVTLHEALAAAELLKKEKINIRVLDPFTIKPLDRKLILDSARATKGRILTVEDHYYEGGIGEAVSSAVVGEPGITVTHLAVNRVPRSGKPAELLKMFGIDRDAIAQAVRGLITKA

SEQ ID NO: 105 - protein, 1383 aa, Homo sapiens
MYATDSRGHSPAFLQPQNGNSRHPSGYVPGKVVPLRPPPPPKSQASAKFTSIRREDRATFAFSPEEQQAQRESQKQKRHKNTFICFAITSFSFFIALAIILGISSKYAPDENCPDQNPRLRNWDPGQDSAKQVVIKEGDMLRLTSDATVHSIVIQDGGLLVFGDNKDGSRNITLRTHYILIQDGGALHIGAEKCRYKSKATITLYGKSDEGESMPTFGKKFIGVEAGGTLELHGARKASWTLLARTLNSSGLPFGSYTFEKDFSRGLNVRVIDQDTAKILESERFDTHEYRNESRRLQEFLRFQDPGRIVAIAVGDSAAKSLLQGTIQMIQERLGSELIQGLGYRQAWALVGVIDGGSTSCNESVRNYENHSSGGKALAQREFYTVDGQKFSVTAYSEWIEGVSLSGFRVEVVDGVKLNLLDDVSSWKPGDQIVVASTDYSMYQAEEFTLLPCSECSHFQVKVKETPQFLHMGEIIDGVDMRAEVGILTRNIVIQGEVEDSCYAENQCQFFDYDTFGGHIMIMKNFTSVHLSYVELKHMGQQQMGRYPVHFHLCGDVDYKGGYRHATFVDGLSIHHSFSRCITVHGTNGLLIKDTIGFDTLGHCFFLEDGIEQRNTLFHNLGLLTKPGTLLPTDRNNSMCTTMRDKVFGNYIPVPATDCMAVSTFWIAHPNNNLINNAAAGSQDAGIWYLFHKEPTGESSGLQLLAKPELTPLGIFYNNRVHSNFKAGLFIDKGVKTTNSSAADPREYLCLDNSARFRPHQDANPEKPRVAALIDRLIAFKNNDNGAWVRGGDIIVQNSAFADNGIGLTFASDGSFPSDEGSSQEVSESLFVGESRNYGFQGGQNKYVGTGGIDQKPRTLPRNRTFPIRGFQIYDGPIHLTRSTFKKYVPTPDRYSSAIGFLMKNSWQITPRNNISLVKFGPHVSLNVFFGKPGPWFEDCEMDGDKNSIFHDIDGSVTGYKDAYVGRMDNYLIRHPSCVNVSKWNAVICSGTYAQVYVQTWSTQNLSMTITRDEYPSNPMVLRGINQKAAFPQYQPVVMLEKGYTIHWNGPAPRTTFLYLVNFNKNDWIRVGLCYPSNTSFQVTFGYLQRQNGSLSKIEEYEPVHSLEELQRKQSERKFYFDSSTGLLFLYLKAKSHRHGHSYCSSQGCERVKIQAATDSKDISNCMAKAYPQYYRKPSVVKRMPAMLTGLCQGCGTRQVVFTSDPHKSYLPVQFQSPDKAETQRGDPSVISVNGTDFTFRSAGVLLLVVDPCSVPFRLTEKTVFPLADVSRIEEYLKTGIPPRSIVLLSTRGEIKQLNISHLLVPLGLAKPAHLYDKGSTIFLGFSGNFKPSWTKLFTSPAGQGLGVLEQFIPLQLDEYGCPRATTVRRRDLELLKQASKAH

SEQ ID NO: 106 - protein, 621 aa, Homo sapiens
MIATGGLLRISARKQDPLRPPSQIPKRKRKAKKRRKNDVVVVKGKLKLCSISGLIALCGILVLLVGIAMAVVGYWPKATGTNREGGKQLPPAGSSHRVPTTANSSSSGSKNRSRSHPRAPGGVNSSSAGAPRSTPPARAASPSSSSTSVGFFFRIFSGYLHSDKLKVFGPLIMGIGIFLFICANAVLHENRDKKTKIINLRDLYSTVIDVHSLRAKDLAAAAAAAAAAAASSSSSAPAAAPPGAIPLNGFLSYVQSRGLELKPGGCGGSGDAFGAAAMLAKGSWPPHPAAPSGGRPRGAASPPDLASSPRCPREPPSLAEAVYSVYRERSGVAGSRRAAAATAAAAASSCSSPAPCSPPESWGRQSTASSFVDSSLSAFALLPLQGGRDRGGDAEGASCSWQRPPGERGSQEIPRGELDLSMTNLRGAEGSMRGARREPEEPEGAVAARAARGQGGRLPRTGRYAALRRRSTSGLPDYRAPPSPEPPPSPGSADPDSSPLAKAASPSPPLRLEGSPPTRRDSGSSQSDDPSSSNKGYTPLREAGTSTESVLDAVAGQTRDSAVAAPVLGAEQSSPEGASQEPPTAEQPQPVQRQFTNKEKLIMISRSHAIGVEEELESTGI

SEQ ID NO: 107 - protein, 246 aa, Homo sapiens
MTMDKSELVQKAKLAEQAERYDDMAAAMKAVTEQGHELSNEERNLLSVAYKNVVGARRSSWRVISSIEQKTERNEKKQQMGKEYREKIEAELQDICNDVLELLDKYLIPNATQPESKVFYLKMKGDYFRYLSEVASGDNKQTTVSNSQQAYQEAFEISKKEMQPTHPIRLGLALNFSVFYYEILNSPEKACSLAKTAFDEAIAELDTLNEESYKDSTLIMQLLRDNLTLWTSENQGDEGDAGEGEN

SEQ ID NO: 108 - protein, 1123 aa, Homo sapiens
MDLGPGDAAGGGPLAPRPRRRRSLRRLFSRFLLALGSRSRPGDSPPRPQPGHCDGDGEGGFACAPGPVPAAPGSPGEERPPGPQPQLQLPAGDGARPPGAQGLKNHGNTCFMNAVVQCLSNTDLLAEFLALGRYRAAPGRAEVTEQLAALVRALWTREYTPQLSAEFKNAVSKYGSQFQGNSQHDALEFLLWLLDRVHEDLEGSSRGPVSEKLPPEATKTSENCLSPSAQLPLGQSFVQSHFQAQYRSSLTCPHCLKQSNTFDPFLCVSLPIPLRQTRFLSVTLVFPSKSQRFLRVGLAVPILSTVAALRKMVAEEGGVPADEVILVELYPSGFQRSFFDEEDLNTIAEGDNVYAFQVPPSPSQGTLSAHPLGLSASPRLAAREGQRFSLSLHSESKVLILFCNLVGSGQQASRFGPPFLIREDRAVSWAQLQQSILSKVRHLMKSEAPVQNLGSLFSIRVVGLSVACSYLSPKDSRPLCHWAVDRVLHLRRPGGPPHVKLAVEWDSSVKERLFGSLQEERAQDADSVWQQQQAHQQHSCTLDECFQFYTKEEQLAQDDAWKCPHCQVLQQGMVKLSLWTLPDILIIHLKRFCQVGERRNKLSTLVKFPLSGLNMAPHVAQRSTSPEAGLGPWPSWKQPDCLPTSYPLDFLYDLYAVCNHHGNLQGGHYTAYCRNSLDGQWYSYDDSTVEPLREDEVNTRGAYILFYQKRNSIPPWSASSSMRGSTSSSLSDHWLLRLGSHAGSTRGSLLSWSSAPCPSLPQVPDSPIFTNSLCNQEKGGLEPRRLVRGVKGRSISMKAPTTSRAKQGPFKTMPLRWSFGSKEKPPGASVELVEYLESRRRPRSTSQSIVSLLTGTAGEDEKSASPRSNVALPANSEDGGRAIERGPAGVPCPSAQPNHCLAPGNSDGPNTARKLKENAGQDIKLPRKFDLPLTVMPSVEHEKPARPEGQKAMNWKESFQMGSKSSPPSPYMGFSGNSKDSRRGTSELDRPLQGTLTLLRSVFRKKENRRNERAEVSPQVPPVSLVSGGLSPAMDGQAPGSPPALRIPEGLARGLGSRLERDVWSAPSSLRLPRKASRAPRGSALGMSQRTVPGEQASYGTFQRVKYHTLSLGRKKTLPESSF

SEQ ID NO: 109 - protein, 1058 aa, Homo sapiens
MSSSPLSKKRRVSGPDPKPGSNCSPAQSVLSEVPSVPTNGMAKNGSEADIDEGLYSRQLYVLGHEAMKRLQTSSVLVSGLRGLGVEIAKNIILGGVKAVTLHDQGTAQWADLSSQFYLREEDIGKNRAEVSQPRLAELNSYVPVTAYTGPLVEDFLSGFQVVVLTNTPLEDQLRVGEFCHNRGIKLVVADTRGLFGQLFCDFGEEMILTDSNGEQPLSAMVSMVTKDNPGVVTCLDEARHGFESGDFVSFSEVQGMVELNGNQPMEIKVLGPYTFSICDTSNFSDYIRGGIVSQVKVPKKISFKSLVASLAEPDFVVTDFAKFSRPAQLHIGFQALHQFCAQHGRPPRPRNEEDAAELVALAQAVNARALPAVQQNNLDEDLIRKLAYVAAGDLAPINAFIGGLAAQEVMKACSGKFMPIMQWLYFDALECLPEDKEVLTEDKCLQRQNRYDGQVAVFGSDLQEKLGKQKYFLVGAGAIGCELLKNFAMIGLGCGEGGEIIVTDMDTIEKSNLNRQFLFRPWDVTKLKSDTAAAAVRQMNPHIRVTSHQNRVGPDTERIYDDDFFQNLDGVANALDNVDARMYMDRRCVYYRKPLLESGTLGTKGNVQVVIPFLTESYSSSQDPPEKSIPICTLKNFPNAIEHTLQWARDEFEGLFKQPAENVNQYLTDPKFVERTLRLAGTQPLEVLEAVQRSLVLQRPQTWADCVTWACHHWHTQYSNNIRQLLHNFPPDQLTSSGAPFWSGPKRCPHPLTFDVNNPLHLDYVMAAANLFAQTYGLTGSQDRAAVATFLQSVQVPEFTPKSGVKIHVSDQELQSANASVDDSRLEELKATLPSPDKLPGFKMYPIDFEKDDDSNFHMDFIVAASNLRAENYDIPSADRHKSKLIAGKIIPAIATTTAAVVGLVCLELYKVVQGHRQLDSYKNGFLNLALPFFGFSEPLAAPRHQYYNQEWTLWDRFEVQGLQPNGEEMTLKQFLDYFKTEHKLEITMLSQGVSMLYSFFMPAAKLKERLDQPMTEIVSRVSKRKLGRHVRALVLELCCNDESGEDVEVPYVRYTIR

SEQ ID NO: 110 - protein, 352 aa, Homo sapiens
MAPLGYFLLLCSLKQALGSYPIWWSLAVGPQYSSLGSQPILCASIPGLVPKQLRFCRNYVEIMPSVAEGIKIGIQECQHQFRGRRWNCTTVHDSLAIFGPVLDKATRESAFVHAIASAGVAFAVTRSCAEGTAAICGCSSRHQGSPGKGWKWGGCSEDIEFGGMVSREFADARENRPDARSAMNRHNNEAGRQAIASHMHLKCKCHGLSGSCEVKTCWWSQPDFRAIGDFLKDKYDSASEMVVEKHRESRGWVETLRPRYTYFKVPTERDLVYYEASPNFCEPNPETGSFGTRDRTCNVSSHGIDGCDLLCCGRGHNARAERRREKCRCVFHWCCYVSCQECTRVYDVHTCK

SEQ ID NO: 111 - protein, 732 aa, Homo sapiens
MVRSGNKAAVVLCMDVGFTMSNSIPGIESPFEQAKKVITMFVQRQVFAENKDEIALVLFGTDGTDNPLSGGDQYQNITVHRHLMLPDFDLLEDIESKIQPGSQQADFLDALIVSMDVIQHETIGKKFEKRHIEIFTDLSSRFSKSQLDIIIHSLKKCDISLQFFLPFSLGKEDGSGDRGDGPFRLGGHGPSFPLKGITEQQKEGLEIVKMVMISLEGEDGLDEIYSFSESLRKLCVFKKIERHSIHWPCRLTIGSNLSIRIAAYKSILQERVKKTWTVVDAKTLKKEDIQKETVYCLNDDDETEVLKEDIIQGFRYGSDIVPFSKVDEEQMKYKSEGKCFSVLGFCKSSQVQRRFFMGNQVLKVFAARDDEAAAVALSSLIHALDDLDMVAIVRYAYDKRANPQVGVAFPHIKHNYECLVYVQLPFMEDLRQYMFSSLKNSKKYAPTEAQLNAVDALIDSMSLAKKDEKTDTLEDLFPTTKIPNPRFQRLFQCLLHRALHPREPLPPIQQHIWNMLNPPAEVTTKSQIPLSKIKTLFPLIEAKKKDQVTAQEIFQDNHEDGPTAKKLKTEQGGAHFSVSSLAEGSVTSVGSVNPAENFRVLVKQKKASFEEASNQLINHIEQFLDTNETPYFMKSIDCIRAFREEAIKFSEEQRFNNFLKALQEKVEIKQLNHFWEIVVQDGITLITKEEASGSSVTAEEAKKFLAPKDKPSGDTAAVFEEGGDVDDLLDMI

SEQ ID NO: 112 - protein, 609 aa, Homo sapiens
MSGWESYYKTEGDEEAEEEQEENLEASGDYKYSGRDSLIFLVDASKAMFESQSEDELTPFDMSIQCIQSVYISKIISSDRDLLAVVFYGTEKDKNSVNFKNIYVLQELDNPGAKRILELDQFKGQQGQKRFQDMMGHGSDYSLSEVLWVCANLFSDVQFKMSHKRIMLFTNEDNPHGNDSAKASRARTKAGDLRDTGIFLDLMHLKKPGGFDISLFYRDIISIAEDEDLRVHFEESSKLEDLLRKVRAKETRKRALSRLKLKLNKDIVISVGIYNLVQKALKPPPIKLYRETNEPVKTKTRTFNTSTGGLLLPSDTKRSQIYGSRQIILEKEETEELKRFDDPGLMLMGFKPLVLLKKHHYLRPSLFVYPEESLVIGSSTLFSALLIKCLEKEVAALCRYTPRRNIPPYFVALVPQEEELDDQKIQVTPPGFQLVFLPFADDKRKMPFTEKIMATPEQVGKMKAIVEKLRFTYRSDSFENPVLQQHFRNLEALALDLMEPEQAVDLTLPKVEAMNKRLGSLVDEFKELVYPPDYNPEGKVTKRKHDNEGSGSKRPKVEYSEEELKTHISKGTLGKFTVPMLKEACRAYGLKSGLKKQELLEALTKHFQD

SEQ ID NO: 113 - protein, 1644 aa, Homo sapiens
MEESKTLKSENHEPKKNVICEESKAVQVIGNQTLKARNDKSVKEIENSSPNRNSSKKNKQNDICIEKTEVKSCKVNAANLPGPKDLGLVLRDQSHCKAKKFPNSPVKAEKATISQAKSEKATSLQAKAEKSPKSPNSVKAEKASSYQMKSEKVPSSPAEAEKGPSLLLKDMRQKTELQQIGKKIPSSFTSVDKVNIEAVGGEKCALQNSPRSQKQQTCTDNTGDSDDSASGIEDVSDDLSKMKNDESNKENSSEMDYLENATVIDESALTPEQRLGLKQAEERLERDHIFRLEKRSPEYTNCRYLCKLCLIHIENIQGAHKHIKEKRHKKNILEKQEESELRSLPPPSPAHLAALSVAVIELAKEHGITDDDLRVRQEIVEEMSKVITTFLPECSLRLYGSSLTRFALKSSDVNIDIKFPPKMNHPDLLIKVLGILKKNVLYVDVESDFHAKVPVVVCRDRKSGLLCRVSAGNDMACLTTDLLTALGKIEPVFIPLVLAFRYWAKLCYIDSQTDGGIPSYCFALMVMFFLQQRKPPLLPCLLGSWIEGFDPKRMDDFQLKGIVEEKFVKWECNSSSATEKNSIAEENKAKADQPKDDTKKTETDNQSNAMKEKHGKSPLALETPNRVSLGQLWLELLKFYTLDFALEEYVICVRIQDILTRENKNWPKRRIAIEDPFSVKRNVARSLNSQLVYEYVVERFRAAYRYFACPQTKGGNKSTVDFKKREKGKISNKKPVKSNNMATNGCILLGETTEKINAEREQPVQCDEMDCTSQRCIIDNNNLLVNELDFADHGQDSSSLSTSKSSEIEPKLDKKQDDLAPSETCLKKELSQCNCIDLSKSPDPDKSTGTDCRSNLETESSHQSVCTDTSATSCNCKATEDASDLNDDDNLPTQELYYVFDKFILTSGKPPTIVCSICKKDGHSKNDCPEDFRKIDLKPLPPMTNRFREILDLVCKRCFDELSPPCSEQHNREQILIGLEKFIQKEYDEKARLCLFGSSKNGFGFRDSDLDICMTLEGHENAEKLNCKEIIENLAKILKRHPGLRNILPITTAKVPIVKFEHRRSGLEGDISLYNTLAQHNTRMLATYAAIDPRVQYLGYTMKVFAKRCDIGDASRGSLSSYAYILMVLYFLQQRKPPVIPVLQEIFDGKQIPQRMVDGWNAFFFDKTEELKKRLPSLGKNTESLGELWLGLLRFYTEEFDFKEYVISIRQKKLLTTFEKQWTSKCIAIEDPFDLNHNLGAGVSRKMTNFIMKAFINGRKLFGTPFYPLIGREAEYFFDSRVLTDGELAPNDRCCRVCGKIGHYMKDCPKRKSLLFRLKKKDSEEEKEGNEEEKDSRDVLDPRDLHDTRDFRDPRDLRCFICGDAGHVRRECPEVKLARQRNSSVAAAQLVRNLVNAQQVAGSAQQQGDQSIRTRQSSECSESPSYSPQPQPFPQNSSQSAAITQPSSQPGSQPKLGPPQQGAQPPHQVQMPLYNFPQSPPAQYSPMHNMGLLPMHPLQIPAPSWPIHGPVIHSAPGSAPSNIGLNDPSIIFAQPAARPVAIPNTSHDGHWPRTVAPNSLVNSGAVGNSEPGFRGLTPPIPWEHAPRPHFPLVPASWPYGLHQNFMHQGNARFQPNKPFYTQDRCATRRCRERCPHPPRGNVSE
